(19) United States
(12) Patent Application Publication
(10) Pub. No.: US 2016/0194399 A1
(43) Pub. Date: Jul. 7, 2016

(54) ANTI-CD3 ANTIBODIES, ACTIVATABLE ANTI-CD3 ANTIBODIES, MULTISPECIFIC ANTI-CD3 ANTIBODIES, MULTISPECIFIC ACTIVATABLE ANTI-CD3 ANTIBODIES, AND METHODS OF USING THE SAME

(71) Applicant: CytomX Therapeutics, Inc., South San Francisco, CA (US)

(72) Inventors: Bryan Allen Irving, Woodside, CA (US); Sherry Lynn La Porte, San Francisco, CA (US); Jason Gary Sagert, San Mateo, CA (US); Daniel Robert Hostetter, Palo Alto, CA (US); Olivia Jennifer Razo, Newark, CA (US); Clayton William White, San Francisco, CA (US); Jennifer Hope Richardson, Fremont, CA (US)

(21) Appl. No.: 14/808,711

(22) Filed: Jul. 24, 2015

Related U.S. Application Data
(60) Provisional application No. 62/029,325, filed on Jul. 25, 2014.

(51) Int. Cl. C07K 16/28; A61K 47/48

(52) U.S. Cl. CPC C07K 16/2809; A61K 47/48384; C07K 16/2863; A61K 47/48561; C07K 2317/31; C07K 2317/622; C07K 2317/565; C07K 2317/73

(57) ABSTRACT

The invention relates generally to antibodies, activatable antibodies, multispecific antibodies, and multispecific activatable antibodies that specifically bind to at least CD3, as well as to methods of making and using these antibodies, activatable antibodies, multispecific antibodies, and/or multispecific activatable antibodies in a variety of therapeutic, diagnostic and prophylactic indications.

### RELATED APPLICATIONS

[0001] This application claims the benefit of U.S. Provisional Application No. 62/029,325, filed Jul. 25, 2014, the contents of which are incorporated herein by reference in their entirety.

### FIELD OF THE DISCLOSURE

[0002] The invention relates generally to antibodies, activatable antibodies, multispecific antibodies, and multispecific activatable antibodies that specifically bind to at least CD3, as well as to methods of making and using these antibodies, activatable antibodies, multispecific antibodies, and/or multispecific activatable antibodies in a variety of therapeutic, diagnostic and prophylactic indications.

### BACKGROUND OF THE DISCLOSURE

[0003] CD3 (Cluster of Differentiation 3) T-cell co-receptor is a multimeric protein composed of four distinct polypeptide chains, referred to as the ε, γ, δ, and ζ chains. The CD3 complex serves as the signaling module of the T cell receptor that associates non-covalently with the antigen-binding a/b chains of T cell receptor (TCR).

[0004] Because direct engagement of CD3 results in T-cell activation, it is a desirable target for a variety of therapeutic and/or diagnostic indications. Accordingly, there exists a need for antibodies and therapeutics that target the CD3/TCR pathway.

### SUMMARY OF THE DISCLOSURE

[0005] The present disclosure provides antibodies and antigen-binding fragments thereof that specifically bind the epsilon chain of CD3, also known as CD3ε. The anti-CD3ε antibodies and antigen-binding fragments thereof of the disclosure activate T cells via engagement of CD3ε on the T cells. That is, such antibodies agonize, stimulate, activate, and/or augment CD3-mediated T cell activation. These antibodies and antigen-binding fragments thereof are referred to herein as “anti-CD3ε antibodies” or “anti-CD3 antibodies.” The anti-CD3ε antibodies and antigen-binding fragments thereof of the disclosure include monoclonal antibodies, such as, for example, mammalian monoclonal antibodies, primate monoclonal antibodies, fully human monoclonal antibodies, as well as humanized monoclonal antibodies and chimeric antibodies, as well as antigen-binding fragments thereof. In some embodiments, the antibodies and antigen-binding fragments thereof are IgG isotype. In some embodiments, the antibodies and antigen-binding fragments thereof are IgG1 isotype. In some embodiments, the antibodies and antigen-binding fragments thereof have one of any of the isotypes disclosed herein.

[0006] In some embodiments, the anti-CD3ε antibody or antigen-binding fragment thereof includes a combination of a VH CDR1 sequence, a VH CDR2 sequence, and a VH CDR3 sequence, wherein at least one of the VH CDR1 sequence, the VH CDR2 sequence, and the VH CDR3 sequence is selected from a VH CDR1 sequence that includes at least the amino acid sequence TYAMN (SEQ ID NO: 53) a VH CD2 sequence that includes at least the amino acid sequence RIRSKYNNYATYYADSVKD (SEQ ID NO: 54); and a VH CDR3 sequence that includes at least the amino acid sequence HGNFGNSYVSWFAY (SEQ ID NO: 55).

[0007] In some embodiments, the anti-CD3ε antibody or antigen-binding fragment thereof includes a combination of a VL CDR1 sequence, a VL CDR2 sequence, and a VL CDR3 sequence, wherein at least one of the VL CDR1 sequence, the VL CDR2 sequence, and the VL CDR3 sequence is selected from a VL CDR1 sequence that includes at least the amino acid sequence RSSTGAVTTSNYAN (SEQ ID NO: 56); a VL CDR2 sequence that includes at least the amino acid sequence GTNKRAP (SEQ ID NO: 57); and a VL CDR3 sequence that includes at least the amino acid sequence ALWYSNLWV (SEQ ID NO: 58).

[0008] In some embodiments, the anti-CD3ε antibody or antigen-binding fragment thereof includes a combination of a VH CDR1 sequence, a VH CDR2 sequence, and a VH CDR3 sequence, wherein at least one of the VH CDR1 sequence, the VH CDR2 sequence, and the VH CDR3 sequence is selected from a VH CDR1 sequence that includes at least the amino acid sequence TYAMN (SEQ ID NO: 53); a VH CD2 sequence that includes at least the amino acid sequence RIRSKYNNYATYYADSVKD (SEQ ID NO: 54); a VH CDR3 sequence that includes at least the amino acid sequence HGNFGNSYVSWFAY (SEQ ID NO: 55), and a combination of a VL CDR1 sequence, a VL CDR2 sequence, and a VL CDR3 sequence, wherein at least one of the VL CDR1 sequence, the VL CDR2 sequence, and the VL CDR3 sequence is selected from a VL CDR1 sequence that includes at least the amino acid sequence RSSTGAVTTSNYAN (SEQ ID NO: 56); a VL CDR2 sequence that includes at least the amino acid sequence GTNKRAP (SEQ ID NO: 57); and a VL CDR3 sequence that includes at least the amino acid sequence ALWYSNLWV (SEQ ID NO: 58).

[0009] In some embodiments, the anti-CD3ε antibody or antigen-binding fragment thereof includes a VH CDR1 sequence that includes at least the amino acid sequence TYAMN (SEQ ID NO: 53); a VH CD2 sequence that includes at least the amino acid sequence RIRSKYNNYATYYADSVKD (SEQ ID NO: 54); a VH CDR3 sequence that includes at least the amino acid sequence HGNFGNSYVSWFAY (SEQ ID NO: 55), a VL CDR1 sequence that includes at least the amino acid sequence RSSTGAVTTSNYAN (SEQ ID NO: 56); a VL CDR2 sequence that includes at least the amino acid sequence GTNKRAP (SEQ ID NO: 57); and a VL CDR3 sequence that includes at least the amino acid sequence ALWYSNLWV (SEQ ID NO: 58).

[0010] In some embodiments, the anti-CD3ε antibody or antigen-binding fragment thereof includes a combination of a VH CDR1 sequence, a VH CDR2 sequence, and a VH CDR3 sequence, wherein at least one of the VH CDR1 sequence, the VH CDR2 sequence, and the VH CDR3 sequence is selected from a VH CDR1 sequence that includes a sequence that is at least 90%, 91%, 92%, 93%, 94%, 95%, 96%, 97%, 98%, 99% or more identical to the amino acid sequence TYAMN (SEQ ID NO: 53); a VH CD2 sequence that includes a sequence that is at least 90%, 91%, 92%, 93%, 94%, 95%, 96%, 97%, 98%, 99% or more identical to the amino acid sequence RIRSKYNNYATYYADSVKD (SEQ ID NO: 54); and a VH CDR3 sequence that includes a sequence that is at least 90%, 91%, 92%, 93%, 94%, 95%, 96%, 97%, 98%, 99% or more identical to the amino acid sequence HGNFGNSYVSWFAY (SEQ ID NO: 55).

[0011] In some embodiments, the anti-CD3ε antibody or antigen-binding fragment thereof includes a combination of a VL CDR1 sequence, a VL CDR2 sequence, and a VL CDR3 sequence, wherein at least one of the VL CDR1 sequence, the VL CDR2 sequence, and the VL CDR3 sequence is selected from a VL CDR1 sequence that includes a sequence that is at least 90%, 91%, 92%, 93%, 94%, 95%, 96%, 97%, 98%, 99% or more identical to the amino acid sequence RSSTGAVTTSNYAN (SEQ ID NO: 56); a VL CDR2 sequence that includes a sequence that is at least 90%, 91%, 92%, 93%, 94%, 95%, 96%, 97%, 98%, 99% or more identical to the amino acid sequence GTNKRAP (SEQ ID NO: 57); and a VL CDR3 sequence that includes a sequence that is at least 90%, 91%, 92%, 93%, 94%, 95%, 96%, 97%, 98%, 99% or more identical to the amino acid sequence ALWYSNLWV (SEQ ID NO: 58).

[0012] In some embodiments, the anti-CD3ε antibody or antigen-binding fragment thereof includes a combination of a VH CDR1 sequence, a VH CDR2 sequence, and a VH CDR3 sequence, wherein at least one of the VH CDR1 sequence, the VH CDR2 sequence, and the VH CDR3 sequence is selected from a VH CDR1 sequence that includes a sequence that is at least 90%, 91%, 92%, 93%, 94%, 95%, 96%, 97%, 98%, 99% or more identical to the amino acid sequence TYAMN (SEQ ID NO: 53); a VH CD2 sequence that includes a sequence that is at least 90%, 91%, 92%, 93%, 94%, 95%, 96%, 97%, 98%, 99% or more identical to the amino acid sequence RIRSKYNNYATYYADSVKD (SEQ ID NO: 54); a VH CDR3 sequence that includes a sequence that is at least 90%, 91%, 92%, 93%, 94%, 95%, 96%, 97%, 98%, 99% or more identical to the amino acid sequence HGNFGNSYVSWFAY (SEQ ID NO: 55), and a combination of a VL CDR1 sequence, a VL CDR2 sequence, and a VL CDR3 sequence, wherein at least one of the VL CDR1 sequence, the VL CDR2 sequence, and the VL CDR3 sequence is selected from a VL CDR1 sequence that includes a sequence that is at least 90%, 91%, 92%, 93%, 94%, 95%, 96%, 97%, 98%, 99% or more identical to the amino acid sequence RSSTGAVTTSNYAN (SEQ ID NO: 56); a VL CDR2 sequence that includes a sequence that is at least 90%, 91%, 92%, 93%, 94%, 95%, 96%, 97%, 98%, 99% or more identical to the amino acid sequence GTNKRAP (SEQ ID NO: 57); and a VL CDR3 sequence that includes a sequence that is at least 90%, 91%, 92%, 93%, 94%, 95%, 96%, 97%, 98%, 99% or more identical to the amino acid sequence ALWYSNLWV (SEQ ID NO: 58).

[0013] In some embodiments, the anti-CD3ε antibody or antigen-binding fragment thereof includes a VH CDR1 sequence that is at least 90%, 91%, 92%, 93%, 94%, 95%, 96%, 97%, 98%, 99% or more identical to the amino acid sequence TYAMN (SEQ ID NO: 53); a VH CD2 sequence that is at least 90%, 91%, 92%, 93%, 94%, 95%, 96%, 97%, 98%, 99% or more identical to the amino acid sequence RIRSKYNNYATYYADSVKD (SEQ ID NO: 54); a VH CDR3 sequence that is at least 90%, 91%, 92%, 93%, 94%, 95%, 96%, 97%, 98%, 99% or more identical to the amino acid sequence HGNFGNSYVSWFAY (SEQ ID NO: 55), a VL CDR1 sequence that is at least 90%, 91%, 92%, 93%, 94%, 95%, 96%, 97%, 98%, 99% or more identical to the amino acid sequence RSSTGAVTTSNYAN (SEQ ID NO: 56); a VL CDR2 sequence that is at least 90%, 91%, 92%, 93%, 94%, 95%, 96%, 97%, 98%, 99% or more identical to the amino acid sequence GTNKRAP (SEQ ID NO: 57); and a VL CDR3 sequence that is at least 90%, 91%, 92%, 93%, 94%, 95%, 96%, 97%, 98%, 99% or more identical to the amino acid sequence ALWYSNLWV (SEQ ID NO: 58).

[0014] In some embodiments, the anti-CD3ε antibody or antigen-binding fragment thereof includes a variable heavy chain (Hv) comprising the amino acid sequence of SEQ ID NO: 4. In some embodiments, the anti-CD3ε antibody or antigen-binding fragment thereof includes a variable light chain (Lv) comprising the amino acid sequence of SEQ ID NO: 2. In some embodiments, the anti-CD3ε antibody or antigen-binding fragment thereof includes a variable heavy chain (Hv) comprising the amino acid sequence of SEQ ID NO: 4 and a variable light chain (Lv) comprising the amino acid sequence of SEQ ID NO: 2.

[0015] In some embodiments, the anti-CD3ε antibody or antigen-binding fragment thereof includes a variable heavy chain (Hv) comprising an amino acid sequence that is at least 90%, 91%, 92%, 93%, 94%, 95%, 96%, 97%, 98%, 99% or more identical to the amino acid sequence of SEQ ID NO: 4. In some embodiments, the anti-CD3ε antibody or antigen-binding fragment thereof includes a variable light chain (Lv) comprising an amino acid sequence that is at least 90%, 91%, 92%, 93%, 94%, 95%, 96%, 97%, 98%, 99% or more identical to the amino acid sequence of SEQ ID NO: 2. In some embodiments, the anti-CD3ε antibody or antigen-binding fragment thereof includes a variable heavy chain (Hv) comprising an amino acid sequence that is at least 90%, 91%, 92%, 93%, 94%, 95%, 96%, 97%, 98%, 99% or more identical to the amino acid sequence of SEQ ID NO: 4 and a variable light chain (Lv) comprising the amino acid sequence of SEQ ID NO: 2.

[0016] In some embodiments, the anti-CD3ε antibody is an scFv antibody fragment that binds CD3ε. In some embodiments, the anti-CD3ε scFv antibody fragment includes the amino acid sequence of SEQ ID NO: 6. In some embodiments, the anti-CD3ε scFv antibody fragment includes the amino acid sequence of SEQ ID NO: 30. In some embodiments, the anti-CD3ε scFv antibody fragment includes an amino acid sequence that is at least 90%, 91%, 92%, 93%, 94%, 95%, 96%, 97%, 98%, 99% or more identical to the amino acid sequence of SEQ ID NO: 6. In some embodiments, the anti-CD3ε scFv antibody fragment includes an amino acid sequence that is at least 90%, 91%, 92%, 93%, 94%, 95%, 96%, 97%, 98%, 99% or more identical to the amino acid sequence of SEQ ID NO: 30.

[0017] In some embodiments, the anti-CD3ε antibody also includes an agent conjugated to the antibody. In some embodiments, the agent is a therapeutic agent. In some embodiments, the agent is a detectable moiety. In some embodiments, the detectable moiety is a diagnostic agent. In some embodiments, the agent is conjugated to the anti-CD3ε antibody via a linker. In some embodiments, the linker is a cleavable linker. In some embodiments, the linker is a non-cleavable linker.

[0018] In some embodiments, the anti-CD3ε antibody naturally contains one or more disulfide bonds. In some embodiments, the anti-CD3ε antibody can be engineered to include one or more disulfide bonds.

[0019] The disclosure also provides an isolated nucleic acid molecule encoding at least a portion of an anti-CD3ε antibody described herein and/or one or more nucleic acid molecules encoding an anti-CD3ε antibody described herein, such as for example, at least a first nucleic acid encoding at least a portion of the heavy chain of the antibody and a second nucleic acid encoding at least a portion of the light chain of the antibody, as well as vectors that include these isolated nucleic acid sequences. The disclosure provides methods of producing an anti-CD3ε antibody by culturing a cell under conditions that lead to expression of the anti-CD3ε antibody, wherein the cell comprises such a nucleic acid molecule(s). In some embodiments, the cell comprises such a vector.

[0020] The disclosure also provides activatable antibodies and activatable antibody compositions that include an antibody or antigen-binding fragment thereof (AB) that specifically binds CD3ε coupled or otherwise attached to a masking moiety (MM), such that coupling of the MM reduces the ability of the AB to bind CD3ε. These activatable antibodies are collectively referred to herein as activatable anti-CD3ε antibodies, also referred to herein as anti-CD3ε activatable antibodies or CD3ε activatable antibodies. In some embodiments, the MM is coupled via a sequence that includes a substrate for a protease. For example, the protease is produced by a tumor that is in proximity to cells that express CD3ε. In some embodiments, the protease is produced by a tumor that is co-localized with cells that express CD3ε. The activatable anti-CD3ε antibodies provided herein are stable in circulation, activated at intended sites of therapy and/or diagnosis but not in normal, i.e., healthy tissue, and, when activated, exhibit binding to CD3ε that is at least comparable to the corresponding, unmodified antibody.

[0021] In some embodiments, the activatable anti-CD3ε antibody or antigen-binding fragment thereof includes a combination of a VH CDR1 sequence, a VH CDR2 sequence, and a VH CDR3 sequence, wherein at least one of the VH CDR1 sequence, the VH CDR2 sequence, and the VH CDR3 sequence is selected from a VH CDR1 sequence that includes at least the amino acid sequence TYAMN (SEQ ID NO: 53); a VH CD2 sequence that includes at least the amino acid sequence RIRSKYNNYATYYADSVKD (SEQ ID NO: 54); and a VH CDR3 sequence that includes at least the amino acid sequence HGNFGNSYVSWFAY (SEQ ID NO: 55).

[0022] In some embodiments, the activatable anti-CD3ε antibody or antigen-binding fragment thereof includes a combination of a VL CDR1 sequence, a VL CDR2 sequence, and a VL CDR3 sequence, wherein at least one of the VL CDR1 sequence, the VL CDR2 sequence, and the VL CDR3 sequence is selected from a VL CDR1 sequence that includes at least the amino acid sequence RSSTGAVTTSNYAN (SEQ ID NO: 56); a VL CDR2 sequence that includes at least the amino acid sequence GTNKRAP (SEQ ID NO: 57); and a VL CDR3 sequence that includes at least the amino acid sequence ALWYSNLWV (SEQ ID NO: 58).

[0023] In some embodiments, the activatable anti-CD3ε antibody or antigen-binding fragment thereof includes a combination of a VH CDR1 sequence, a VH CDR2 sequence, and a VH CDR3 sequence, wherein at least one of the VH CDR1 sequence, the VH CDR2 sequence, and the VH CDR3 sequence is selected from a VH CDR1 sequence that includes at least the amino acid sequence TYAMN (SEQ ID NO: 53); a VH CD2 sequence that includes at least the amino acid sequence RIRSKYNNYATYYADSVKD (SEQ ID NO: 54); a VH CDR3 sequence that includes at least the amino acid sequence HGNFGNSYVSWFAY (SEQ ID NO: 55), and a combination of a VL CDR1 sequence, a VL CDR2 sequence, and a VL CDR3 sequence, wherein at least one of the VL CDR1 sequence, the VL CDR2 sequence, and the VL CDR3 sequence is selected from a VL CDR1 sequence that includes at least the amino acid sequence RSSTGAVTTSNYAN (SEQ ID NO: 56); a VL CDR2 sequence that includes at least the amino acid sequence GTNKRAP (SEQ ID NO: 57); and a VL CDR3 sequence that includes at least the amino acid sequence ALWYSNLWV (SEQ ID NO: 58).

[0024] In some embodiments, the activatable anti-CD3ε antibody or antigen-binding fragment thereof includes a VH CDR1 sequence that includes at least the amino acid sequence TYAMN (SEQ ID NO: 53); a VH CD2 sequence that includes at least the amino acid sequence RIRSKYNNYATYYADSVKD (SEQ ID NO: 54); a VH CDR3 sequence that includes at least the amino acid sequence HGNFGNSYVSWFAY (SEQ ID NO: 55), a VL CDR1 sequence that includes at least the amino acid sequence RSSTGAVTTSNYAN (SEQ ID NO: 56); a VL CDR2 sequence that includes at least the amino acid sequence GTNKRAP (SEQ ID NO: 57); and a VL CDR3 sequence that includes at least the amino acid sequence ALWYSNLWV (SEQ ID NO: 58).

[0025] In some embodiments, the activatable anti-CD3ε antibody or antigen-binding fragment thereof includes a combination of a VH CDR1 sequence, a VH CDR2 sequence, and a VH CDR3 sequence, wherein at least one of the VH CDR1 sequence, the VH CDR2 sequence, and the VH CDR3 sequence is selected from a VH CDR1 sequence that includes a sequence that is at least 90%, 91%, 92%, 93%, 94%, 95%, 96%, 97%, 98%, 99% or more identical to the amino acid sequence TYAMN (SEQ ID NO: 53); a VH CD2 sequence that includes a sequence that is at least 90%, 91%, 92%, 93%, 94%, 95%, 96%, 97%, 98%, 99% or more identical to the amino acid sequence RIRSKYNNYATYYADSVKD (SEQ ID NO: 54); and a VH CDR3 sequence that includes a sequence that is at least 90%, 91%, 92%, 93%, 94%, 95%, 96%, 97%, 98%, 99% or more identical to the amino acid sequence HGNFGNSYVSWFAY (SEQ ID NO: 55).

[0026] In some embodiments, the activatable anti-CD3ε antibody or antigen-binding fragment thereof includes a combination of a VL CDR1 sequence, a VL CDR2 sequence, and a VL CDR3 sequence, wherein at least one of the VL CDR1 sequence, the VL CDR2 sequence, and the VL CDR3 sequence is selected from a VL CDR1 sequence that includes a sequence that is at least 90%, 91%, 92%, 93%, 94%, 95%, 96%, 97%, 98%, 99% or more identical to the amino acid sequence RSSTGAVTTSNYAN (SEQ ID NO: 56); a VL CDR2 sequence that includes a sequence that is at least 90%, 91%, 92%, 93%, 94%, 95%, 96%, 97%, 98%, 99% or more identical to the amino acid sequence GTNKRAP (SEQ ID NO: 57); and a VL CDR3 sequence that includes a sequence that is at least 90%, 91%, 92%, 93%, 94%, 95%, 96%, 97%, 98%, 99% or more identical to the amino acid sequence ALWYSNLWV (SEQ ID NO: 58).

[0027] In some embodiments, the activatable anti-CD3ε antibody or antigen-binding fragment thereof includes a combination of a VH CDR1 sequence, a VH CDR2 sequence, and a VH CDR3 sequence, wherein at least one of the VH CDR1 sequence, the VH CDR2 sequence, and the VH CDR3 sequence is selected from a VH CDR1 sequence that includes a sequence that is at least 90%, 91%, 92%, 93%, 94%, 95%, 96%, 97%, 98%, 99% or more identical to the amino acid sequence TYAMN (SEQ ID NO: 53); a VH CD2 sequence that includes a sequence that is at least 90%, 91%, 92%, 93%, 94%, 95%, 96%, 97%, 98%, 99% or more identical to the amino acid sequence RIRSKYNNYATYYADSVKD (SEQ ID NO: 54); a VH CDR3 sequence that includes a sequence that is at least 90%, 91%, 92%, 93%, 94%, 95%, 96%, 97%, 98%, 99% or more identical to the amino acid sequence HGNFGNSYVSWFAY (SEQ ID NO: 55), and a combination of a VL CDR1 sequence, a VL CDR2 sequence, and a VL CDR3 sequence, wherein at least one of the VL CDR1 sequence, the VL CDR2 sequence, and the VL CDR3 sequence is selected from a VL CDR1 sequence that includes a sequence that is at least 90%, 91%, 92%, 93%, 94%, 95%, 96%, 97%, 98%, 99% or more identical to the amino acid sequence RSSTGAVTTSNYAN (SEQ ID NO: 56); a VL CDR2 sequence that includes a sequence that is at least 90%, 91%, 92%, 93%, 94%, 95%, 96%, 97%, 98%, 99% or more identical to the amino acid sequence GTNKRAP (SEQ ID NO: 57); and a VL CDR3 sequence that includes a sequence that is at least 90%, 91%, 92%, 93%, 94%, 95%, 96%, 97%, 98%, 99% or more identical to the amino acid sequence ALWYSNLWV (SEQ ID NO: 58).

[0028] In some embodiments, the activatable anti-CD3ε antibody or antigen-binding fragment thereof includes a VH CDR1 sequence that is at least 90%, 91%, 92%, 93%, 94%, 95%, 96%, 97%, 98%, 99% or more identical to the amino acid sequence TYAMN (SEQ ID NO: 53); a VH CD2 sequence that is at least 90%, 91%, 92%, 93%, 94%, 95%, 96%, 97%, 98%, 99% or more identical to the amino acid sequence RIRSKYNNYATYYADSVKD (SEQ ID NO: 54); a VH CDR3 sequence that is at least 90%, 91%, 92%, 93%, 94%, 95%, 96%, 97%, 98%, 99% or more identical to the amino acid sequence HGNFGNSYVSWFAY (SEQ ID NO: 55), a VL CDR1 sequence that is at least 90%, 91%, 92%, 93%, 94%, 95%, 96%, 97%, 98%, 99% or more identical to the amino acid sequence RSSTGAVTTSNYAN (SEQ ID NO: 56); a VL CDR2 sequence that is at least 90%, 91%, 92%, 93%, 94%, 95%, 96%, 97%, 98%, 99% or more identical to the amino acid sequence GTNKRAP (SEQ ID NO: 57); and a VL CDR3 sequence that is at least 90%, 91%, 92%, 93%, 94%, 95%, 96%, 97%, 98%, 99% or more identical to the amino acid sequence ALWYSNLWV (SEQ ID NO: 58).

[0029] In some embodiments, the activatable antibody comprises a combination of a variable heavy chain complementarity determining region 1 (VH CDR1, also referred to herein as CDRH1) sequence, a variable heavy chain complementarity determining region 2 (VH CDR2, also referred to herein as CDRH2) sequence, a variable heavy chain complementarity determining region 3 (VH CDR3, also referred to herein as CDRH3) sequence, a variable light chain complementarity determining region 1 (VL CDR1, also referred to herein as CDRL1) sequence, a variable light chain complementarity determining region 2 (VL CDR2, also referred to herein as CDRL2) sequence, and a variable light chain complementarity determining region 3 (VL CDR3, also referred to herein as CDRL3) sequence, wherein at least one CD3ε sequence is selected from the group consisting of a VH CDR1 sequence shown in Table 18; a VH CDR2 sequence shown in Table 18; a VH CDR3 sequence shown in Table 18; a VL CDR1 sequence shown in Table 18; a VL CDR2 sequence shown in Table 18; and a VL CDR3 sequence shown in Table 18.

[0030] In some embodiments, the activatable antibody comprises a combination of a VH CDR1 sequence, a VH CDR2 sequence, a VH CDR3 sequence, a VL CDR1 sequence, a VL CDR2 sequence, and a VL CDR3 sequence, wherein at least one CD3ε sequence is selected from the group consisting of a VH CDR1 sequence that includes a sequence that is at least 90%, 91%, 92%, 93%, 94%, 95%, 96%, 97%, 98%, 99% or more identical to a VH CDR1 sequence shown in Table 18; a VH CD2 sequence that includes a sequence that is at least 90%, 91%, 92%, 93%, 94%, 95%, 96%, 97%, 98%, 99% or more identical to a VH CDR2 sequence shown in Table 18; a VH CDR3 sequence that includes a sequence that is at least 90%, 91%, 92%, 93%, 94%, 95%, 96%, 97%, 98%, 99% or more identical to a VH CDR3 sequence shown in Table 18; a VL CDR1 sequence that includes a sequence that is at least 90%, 91%, 92%, 93%, 94%, 95%, 96%, 97%, 98%, 99% or more identical to a VL CDR1 sequence shown in Table 18; a VL CDR2 sequence that includes a sequence that is at least 90%, 91%, 92%, 93%, 94%, 95%, 96%, 97%, 98%, 99% or more identical to a VL CDR2 sequence shown in Table 18; and a VL CDR3 sequence that includes a sequence that is at least 90%, 91%, 92%, 93%, 94%, 95%, 96%, 97%, 98%, 99% or more identical to a VL CDR3 sequence shown in Table 18.

[0031] In some embodiments, the activatable antibody comprises a combination of a VH CDR1 sequence, a VH CDR2 sequence, a VH CDR3 sequence, a VL CDR1 sequence, a VL CDR2 sequence, and a VL CDR3 sequence, wherein the combination is a combination shown in Table 18.

[0032] In some embodiments, the activatable antibody comprises a combination of a VH CDR1 sequence, a VH CDR2 sequence, a VH CDR3 sequence, a VL CDR1 sequence, a VL CDR2 sequence, and a VL CDR3 sequence, wherein each CD3ε sequence in the combination comprises a sequence that is at least 90%, 91%, 92%, 93%, 94%, 95%, 96%, 97%, 98%, 99% or more identical to the corresponding CD3ε sequence in a combination shown in Table 18.

[0033] In some embodiments, the activatable anti-CD3ε antibody or antigen-binding fragment thereof includes a variable heavy chain (Hv) comprising the amino acid sequence of SEQ ID NO: 4. In some embodiments, the anti-CD3ε antibody or antigen-binding fragment thereof includes a variable light chain (Lv) comprising the amino acid sequence of SEQ ID NO: 2. In some embodiments, the anti-CD3ε antibody or antigen-binding fragment thereof includes a variable heavy chain (Hv) comprising the amino acid sequence of SEQ ID NO: 4 and a variable light chain (Lv) comprising the amino acid sequence of SEQ ID NO: 2.

[0034] In some embodiments, the activatable anti-CD3ε antibody or antigen-binding fragment thereof includes a variable heavy chain (Hv) comprising an amino acid sequence that is at least 90%, 91%, 92%, 93%, 94%, 95%, 96%, 97%, 98%, 99% or more identical to the amino acid sequence of SEQ ID NO: 4. In some embodiments, the anti-CD3ε antibody or antigen-binding fragment thereof includes a variable light chain (Lv) comprising an amino acid sequence that is at least 90%, 91%, 92%, 93%, 94%, 95%, 96%, 97%, 98%, 99% or more identical to the amino acid sequence of SEQ ID NO: 2. In some embodiments, the anti-CD3ε antibody or antigen-binding fragment thereof includes a variable heavy chain (Hv) comprising an amino acid sequence that is at least 90%, 91%, 92%, 93%, 94%, 95%, 96%, 97%, 98%, 99% or more identical to the amino acid sequence of SEQ ID NO: 4 and a variable light chain (Lv) comprising the amino acid sequence of SEQ ID NO: 2.

[0035] In some embodiments, the activatable anti-CD3ε antibody includes an scFv antibody fragment that binds CD3ε. In some embodiments, the anti-CD3ε scFv antibody fragment includes the amino acid sequence of SEQ ID NO: 6. In some embodiments, the anti-CD3ε scFv antibody fragment includes the amino acid sequence of SEQ ID NO: 30. In some embodiments, the anti-CD3ε scFv antibody fragment includes an amino acid sequence that is at least 90%, 91%, 92%, 93%, 94%, 95%, 96%, 97%, 98%, 99% or more identical to the amino acid sequence of SEQ ID NO: 6. In some embodiments, the anti-CD3ε scFv antibody fragment includes an amino acid sequence that is at least 90%, 91%, 92%, 93%, 94%, 95%, 96%, 97%, 98%, 99% or more identical to the amino acid sequence of SEQ ID NO: 30.

[0036] In some embodiments, the activatable antibody comprises a heavy chain amino acid sequence selected from the group consisting of the heavy chain sequences shown in Table 17. In some embodiments, the activatable antibody comprises a light chain amino acid sequence selected from the group consisting of the light chain sequences shown in Table 17. In some embodiments, the activatable antibody comprises a heavy chain amino acid sequence selected from the group consisting of the heavy chain sequences shown in Table 17 and a light chain amino acid sequence selected from the group consisting of the light chain sequences shown in Table 17.

[0037] In some embodiments, the activatable antibody comprises a heavy chain amino acid sequence that is at least 90%, 91%, 92%, 93%, 94%, 95%, 96%, 97%, 98% or 99% identical to an amino acid sequence selected from the group consisting of the heavy chain sequences shown in Table 17. In some embodiments, the activatable antibody comprises a light chain amino acid sequence that is at least 90%, 91%, 92%, 93%, 94%, 95%, 96%, 97%, 98% or 99% identical to an amino acid sequence selected from the group consisting of the light chain sequences shown in Table 17. In some embodiments, the activatable antibody comprises a heavy chain amino acid sequence that is at least 90%, 91%, 92%, 93%, 94%, 95%, 96%, 97%, 98% or 99% identical to an amino acid sequence selected from the group consisting of the heavy chain sequences shown in Table 17 and a light chain amino acid sequence that is at least 90%, 91%, 92%, 93%, 94%, 95%, 96%, 97%, 98% or 99% identical to an amino acid sequence selected from the group consisting of the light chain sequences shown in Table 17.

[0038] In some embodiments, the MM has a dissociation constant, i.e., dissociation constant at an equilibrium state, K_{d} for binding to the AB that is greater than the K_{d} for binding of the AB to CD3ε.

[0039] In some embodiments, the MM has a K_{d} for binding to the AB that is no more than the K_{d} for binding of the AB to CD3ε.

[0040] In some embodiments, the MM has a K_{d} for binding to the AB that is no less than the K_{d} for binding of the AB to CD3ε.

[0041] In some embodiments, the MM has a K_{d} for binding to the AB that is approximately equal to the K_{d} for binding of the AB to CD3ε.

[0042] In some embodiments, the MM has a K_{d} for binding to the AB that is less than the IQ for binding of the AB to CD3ε.

[0043] In some embodiments, the MM has a K_{d} for binding to the AB that is no more than 2, 3, 4, 5, 10, 25, 50, 100, 250, 500, or 1,000 fold greater than the K_{d} for binding of the AB to CD3ε. In some embodiments, the MM has a K_{d} for binding to the AB that is between 1-5, 2-5, 2-10, 5-10, 5-20, 5-50, 5-100, 10-100, 10-1,000, 20-100, 20-1000, or 100-1,000 fold greater than the K_{d} for binding of the AB to CD3ε.

[0044] In some embodiments, the MM has an affinity for binding to the AB that is less than the affinity of binding of the AB to CD3ε.

[0045] In some embodiments, the MM has an affinity for binding to the AB that is no more than the affinity of binding of the AB to CD3ε.

[0046] In some embodiments, the MM has an affinity for binding to the AB that is approximately equal of the affinity of binding of the AB to CD3ε.

[0047] In some embodiments, the MM has an affinity for binding to the AB that is no less than the affinity of binding of the AB to CD3ε.

[0048] In some embodiments, the MM has an affinity for binding to the AB that is greater than the affinity of binding of the AB to CD3ε.

[0049] In some embodiments, the MM has an affinity for binding to the AB that is 2, 3, 4, 5, 10, 25, 50, 100, 250, 500, or 1,000 less than the affinity of binding of the AB to CD3ε. In some embodiments, the MM has an affinity for binding to the AB that is between 1-5, 2-5, 2-10, 5-10, 5-20, 5-50, 5-100, 10-100, 10-1,000, 20-100, 20-1000, or 100-1,000 fold less than the affinity of binding of the AB to CD3ε. In some embodiments, the MM has an affinity for binding to the AB that is 2 to 20 fold less than the affinity of binding of the AB to CD3ε. In some embodiments, a MM not covalently linked to the AB and at equimolar concentration to the AB does not inhibit the binding of the AB to CD3ε.

[0050] In some embodiments, the MM does not interfere or compete with the AB for binding to CD3ε when the activatable antibody is in a cleaved state.

[0051] In some embodiments, the MM is a polypeptide of no more than 40 amino acids in length.

[0052] In some embodiments, the MM polypeptide sequence is different from that of CD3ε. In some embodiments, the MM polypeptide sequence is no more than 50% identical to any natural binding partner of the AB. In some embodiments, the MM polypeptide sequence is no more than 25% identical to any natural binding partner of the AB. In some embodiments, the MM polypeptide sequence is no more than 10% identical to any natural binding partner of the AB.

[0053] In some embodiments, the MM comprises a sequence selected from the group consisting of the sequences shown in Table 7 or Table 8.

[0054] In some embodiments, the protease is produced by a tumor that is in proximity to cells that express CD3ε and/or is produced by a tumor that is co-localized with cells that express CD3ε in a tissue, and wherein the protease cleaves the CM in the activatable antibody when the activatable antibody is exposed to the protease. In some embodiments, the CM is a polypeptide of up to 15 amino acids in length. In some embodiments, the CM is a substrate for a protease selected from the proteases listed in Table 3. In some embodiments, the CM is a substrate for a protease selected from the group consisting of uPA, legumain, matriptase (also referred to herein as MT-SP1 or MTSP1), ADAM17, BMP-1, TMPRSS3, TMPRSS4, MMP-9, MMP-12, MMP-13, MMP-14, and any of those shown in Table 3. In some embodiments, the CM is a substrate for an protease selected from the group consisting of uPA, legumain, and matriptase. In some embodiments, the CM is a substrate for a matrix metalloprotease (MMP).

[0055] In some embodiments, the antigen binding fragment thereof is selected from the group consisting of a Fab fragment, a F(ab′)₂ fragment, a scFv, a scab, a dAb, a single domain heavy chain antibody, and a single domain light chain antibody.

[0056] In some embodiments, the activatable antibody in the uncleaved state has the structural arrangement from N-terminus to C-terminus as follows: MM-CM-AB or AB-CM-MM. In some embodiments, the activatable antibody comprises a linking peptide between the MM and the CM. In some embodiments, the activatable antibody comprises a linking peptide between the CM and the AB. In some embodiments, the activatable antibody comprises a first linking peptide (LP1) and a second linking peptide (LP2), wherein the activatable antibody in the uncleaved state has the structural arrangement from N-terminus to C-terminus as follows: MM-LP1-CM-LP2-AB or AB-LP2-CM-LP1-MM. In some embodiments, the two linking peptides need not be identical to each other. In some embodiments, each of LP1 and LP2 is a peptide of about 1 to 20 amino acids in length.

[0057] In some embodiments, the activatable anti-CD3ε antibody also includes an agent conjugated to the activatable antibody. In some embodiments, the agent is a therapeutic agent. In some embodiments, the agent is a detectable moiety. In some embodiments, the detectable moiety is a diagnostic agent. In some embodiments, the agent is conjugated to the activatable anti-CD3ε antibody via a linker. In some embodiments, the linker is a cleavable linker. In some embodiments, the linker is a non-cleavable linker.

[0058] The disclosure also provides multispecific antibodies that bind the epsilon chain of CD3 (CD3ε) and a second target, wherein the antibody comprises a first antibody or antigen-binding fragment thereof (AB1) that binds the epsilon chain of CD3 (CD3ε) and a second antibody or antigen-binding fragment thereof (AB2) that binds a second target, and wherein AB1 comprises a VH CDR1 sequence that includes at least the amino acid sequence TYAMN (SEQ ID NO: 53); a VH CD2 sequence that includes at least the amino acid sequence RIRSKYNNYATYYADSVKD (SEQ ID NO: 54); a VH CDR3 sequence that includes at least the amino acid sequence HGNFGNSYVSWFAY (SEQ ID NO: 55), and a combination of a VL CDR1 sequence, a VL CDR2 sequence, and a VL CDR3 sequence, wherein at least one of the VL CDR1 sequence, the VL CDR2 sequence, and the VL CDR3 sequence is selected from a VL CDR1 sequence that includes at least the amino acid sequence RSSTGAVTTSNYAN (SEQ ID NO: 56); a VL CDR2 sequence that includes at least the amino acid sequence GTNKRAP (SEQ ID NO: 57); and a VL CDR3 sequence that includes at least the amino acid sequence ALWYSNLWV (SEQ ID NO: 58).

[0059] In some embodiments, the activatable antibodies described herein in an activated state bind CD3ε and include (i) an antibody or an antigen binding fragment thereof (AB) that specifically binds to CD3ε; (ii) a masking moiety (MM) that inhibits the binding of the AB to CD3ε when the activatable antibody is in an uncleaved state; and (c) a cleavable moiety (CM) coupled to the AB, wherein the CM is a polypeptide that functions as a substrate for a protease. In some embodiments, the MM is coupled to the AB via the CM.

[0060] In some embodiments, the activatable antibody in the uncleaved state has the structural arrangement from N-terminus to C-terminus as follows: MM-CM-AB or AB-CM-MM.

[0061] In some embodiments, the activatable antibody comprises a linking peptide between the MM and the CM.

[0062] In some embodiments, the activatable antibody comprises a linking peptide between the CM and the AB.

[0063] In some embodiments, the activatable antibody comprises a first linking peptide (LP1) and a second linking peptide (LP2), and the activatable antibody in the uncleaved state has the structural arrangement from N-terminus to C-terminus as follows: MM-LP1-CM-LP2-AB or AB-LP2-CM-LP1-MM. In some embodiments, the two linking peptides need not be identical to each other.

[0064] In some embodiments, at least one of LP1 or LP2 includes an amino acid sequence selected from the group consisting of (GS)ₙ, (GGS)ₙ, (GSGGS)ₙ (SEQ ID NO: 59) and (GGGS)ₙ (SEQ ID NO: 60), where n is an integer of at least one. In some embodiments, at least one of LP1 or LP2 includes an amino acid sequence selected from the group consisting of GGSG (SEQ ID NO: 61), GGSGG (SEQ ID NO: 62), GSGSG (SEQ ID NO: 63), GSGGG (SEQ ID NO: 64), GGGSG (SEQ ID NO: 65), and GSSSG (SEQ ID NO: 66).

[0065] In some embodiments, the activatable antibody includes an antibody or antigen-binding fragment thereof that specifically binds CD3ε. In some embodiments, the antibody or antigen-binding fragment thereof that binds CD3ε is a monoclonal antibody, domain antibody, single chain, Fab fragment, a F(ab′)₂ fragment, a scFv, a scAb, a dAb, a single domain heavy chain antibody, or a single domain light chain antibody. In some embodiments, such an antibody or antigen-binding fragment thereof that binds CD3ε is a rodent (e.g., mouse or rat), chimeric, humanized or fully human monoclonal antibody.

[0066] In some embodiments, the AB has a dissociation constant of about 100 nM or less for binding to CD3ε.

[0067] In some embodiments, the MM has a dissociation constant, i.e., dissociation constant at an equilibrium state, K_{d} for binding to the AB that is greater than the K_{d} for binding of the AB to CD3ε.

[0068] In some embodiments, the MM has a K_{d} for binding to the AB that is no more than the K_{d} for binding of the AB to CD3ε.

[0069] In some embodiments, the MM has a K_{d} for binding to the AB that is no less than the K_{d} for binding of the AB to CD3ε.

[0070] In some embodiments, the MM has a K_{d} for binding to the AB that is approximately equal to the K_{d} for binding of the AB to CD3ε.

[0071] In some embodiments, the MM has a K_{d} for binding to the AB that is less than the IQ for binding of the AB to CD3ε.

[0072] In some embodiments, the MM has a K_{d} for binding to the AB that is no more than 2, 3, 4, 5, 10, 25, 50, 100, 250, 500, or 1,000 fold greater than the K_{d} for binding of the AB to CD3ε. In some embodiments, the MM has a K_{d} for binding to the AB that is between 1-5, 2-5, 2-10, 5-10, 5-20, 5-50, 5-100, 10-100, 10-1,000, 20-100, 20-1000, or 100-1,000 fold greater than the K_{d} for binding of the AB to CD3ε.

[0073] In some embodiments, the MM has an affinity for binding to the AB that is less than the affinity of binding of the AB to CD3ε.

[0074] In some embodiments, the MM has an affinity for binding to the AB that is no more than the affinity of binding of the AB to CD3ε.

[0075] In some embodiments, the MM has an affinity for binding to the AB that is approximately equal of the affinity of binding of the AB to CD3ε.

[0076] In some embodiments, the MM has an affinity for binding to the AB that is no less than the affinity of binding of the AB to CD3ε.

[0077] In some embodiments, the MM has an affinity for binding to the AB that is greater than the affinity of binding of the AB to CD3ε.

[0078] In some embodiments, the MM has an affinity for binding to the AB that is 2, 3, 4, 5, 10, 25, 50, 100, 250, 500, or 1,000 less than the affinity of binding of the AB to CD3ε. In some embodiments, the MM has an affinity for binding to the AB that is between 1-5, 2-5, 2-10, 5-10, 5-20, 5-50, 5-100, 10-100, 10-1,000, 20-100, 20-1000, or 100-1,000 fold less than the affinity of binding of the AB to CD3ε. In some embodiments, the MM has an affinity for binding to the AB that is 2 to 20 fold less than the affinity of binding of the AB to CD3ε. In some embodiments, a MM not covalently linked to the AB and at equimolar concentration to the AB does not inhibit the binding of the AB to CD3ε.

[0079] In some embodiments, the MM does not interfere or compete with the AB for binding to CD3ε when the activatable antibody is in a cleaved state.

[0080] In some embodiments, the MM is a polypeptide of about 2 to 40 amino acids in length. In some embodiments, the MM is a polypeptide of no more than 40 amino acids in length.

[0081] In some embodiments, the MM polypeptide sequence is different from that of CD3ε. In some embodiments, the MM polypeptide sequence is no more than 50% identical to any natural binding partner of the AB. In some embodiments, the MM polypeptide sequence is different from that of CD3ε and wherein the MM polypeptide sequence is no more than 25% identical to any natural binding partner of the AB. In some embodiments, the MM polypeptide sequence is different from that of CD3ε and wherein the MM polypeptide sequence is no more than 10% identical to any natural binding partner of the AB.

[0082] In some embodiments, the coupling of the MM reduces the ability of the AB to bind CD3ε such that the dissociation constant (K_{d}) of the AB when coupled to the MM towards CD3ε is at least 20 times greater than the K_{d} of the AB when not coupled to the MM towards CD3ε.

[0083] In some embodiments, the coupling of the MM reduces the ability of the AB to bind CD3ε such that the dissociation constant (K_{d}) of the AB when coupled to the MM towards CD3ε is at least 40 times greater than the K_{d} of the AB when not coupled to the MM towards CD3ε.

[0084] In some embodiments, the coupling of the MM reduces the ability of the AB to bind CD3ε such that the dissociation constant (K_{d}) of the AB when coupled to the MM towards CD3ε is at least 100 times greater than the K_{d} of the AB when not coupled to the MM towards CD3ε.

[0085] In some embodiments, the coupling of the MM reduces the ability of the AB to bind CD3ε such that the dissociation constant (K_{d}) of the AB when coupled to the MM towards CD3ε is at least 1000 times greater than the K_{d} of the AB when not coupled to the MM towards CD3ε.

[0086] In some embodiments, the coupling of the MM reduces the ability of the AB to bind CD3ε such that the dissociation constant (K_{d}) of the AB when coupled to the MM towards CD3ε is at least 10,000 times greater than the K_{d} of the AB when not coupled to the MM towards CD3ε.

[0087] In some embodiments, in the presence of CD3ε, the MM reduces the ability of the AB to bind CD3ε by at least 90% when the CM is uncleaved, as compared to when the CM is cleaved when assayed in vitro using a target displacement assay such as, for example, the assay described in PCT Publication No. WO 2010/081173, the contents of which are hereby incorporated by reference in their entirety.

[0088] In some embodiments, the MM does not interfere or compete with the AB of the activatable antibody in a cleaved state for binding to the CD3ε target.

[0089] In some embodiments, the MM is an amino acid sequence selected from the group of those listed in Tables 7 or 8.

[0090] In some embodiments, the protease is produced by a tumor that is in proximity to cells that express CD3ε and/or produced by a tumor that is co-localized with CD3ε in a tissue, and the protease cleaves the CM in the activatable antibody when the activatable antibody is exposed to the protease.

[0091] In some embodiments, the CM is positioned in the activatable antibody such that when the activatable antibody is in the uncleaved state, binding of the activatable antibody to CD3ε is reduced to occur with a dissociation constant that is at least 20-fold greater than the dissociation constant of an unmodified AB binding to CD3ε, and whereas when the activatable antibody is in the cleaved state, the AB binds CD3ε.

[0092] In some embodiments, the CM is positioned in the activatable antibody such that when the activatable antibody is in the uncleaved state, binding of the activatable antibody to CD3ε is reduced to occur with a dissociation constant that is at least 40-fold greater than the dissociation constant of an unmodified AB binding to CD3ε, and whereas when the activatable antibody is in the cleaved state, the AB binds CD3ε.

[0093] In some embodiments, the CM is positioned in the activatable antibody such when the activatable antibody is that in the uncleaved state, binding of the activatable antibody to CD3ε is reduced to occur with a dissociation constant that is at least 50-fold greater than the dissociation constant of an unmodified AB binding to CD3ε, and whereas when the activatable antibody is in the cleaved state, the AB binds CD3ε.

[0094] In some embodiments, the CM is positioned in the activatable antibody such that when the activatable antibody is in the uncleaved state, binding of the activatable antibody to CD3ε is reduced to occur with a dissociation constant that is at least 100-fold greater than the dissociation constant of an unmodified AB binding to CD3ε, and whereas when the activatable antibody is in the cleaved state, the AB binds CD3ε.

[0095] In some embodiments, the CM is positioned in the activatable antibody such that when the activatable antibody is in the uncleaved state, binding of the activatable antibody to CD3ε is reduced to occur with a dissociation constant that is at least 200-fold greater than the dissociation constant of an unmodified AB binding to CD3ε, and whereas when the activatable antibody is in the cleaved state, the AB binds CD3ε.

[0096] In some embodiments, the CM is a polypeptide of up to 15 amino acids in length.

[0097] In some embodiments, the CM includes the amino acid sequence LSGRSDNH (SEQ ID NO: 67). In some embodiments, the cleavable moiety is selected for use with a specific protease, for example a protease that is known to be produced by a tumor that is in proximity to cells that express the target of the activatable antibody, e.g., CD3ε, and/or produced by a tumor that is co-localized with the target of the activatable antibody. For example, suitable cleavable moieties for use in the activatable anti-CD3ε antibodies of the disclosure are cleaved by at least a protease such as urokinase, legumain, and/or matriptase (also referred to herein as MT-SP1 or MTSP1). In some embodiments, a suitable cleavable moiety includes at least one of the following sequences: TGRGPSWV (SEQ ID NO: 68); SARGPSRW (SEQ ID NO: 69); TARGPSFK (SEQ ID NO: 70); LSGRSDNH (SEQ ID NO: 67); GGWHTGRN (SEQ ID NO: 71); HTGRSGAL (SEQ ID NO: 72); PLTGRSGG (SEQ ID NO: 73); AARGPAIH (SEQ ID NO: 74); RGPAFNPM (SEQ ID NO: 75); SSRGPAYL (SEQ ID NO: 76); RGPATPIM (SEQ ID NO: 77); RGPA (SEQ ID NO: 78); GGQPSGMWGW (SEQ ID NO: 79); FPRPLGITGL (SEQ ID NO: 80); VHMPLGFLGP (SEQ ID NO: 81); SPLTGRSG (SEQ ID NO: 82); SAGFSLPA (SEQ ID NO: 83); LAPLGLQRR (SEQ ID NO: 84); SGGPLGVR (SEQ ID NO: 85); and/or PLGL (SEQ ID NO: 86).

[0098] In some embodiments, the CM comprises the amino acid sequence LSGRSDNH (SEQ ID NO: 67). In some embodiments, the CM comprises the amino acid sequence TGRGPSWV (SEQ ID NO: 68). In some embodiments, the CM comprises the amino acid sequence SARGPSRW (SEQ ID NO: 69). In some embodiments, the CM comprises the amino acid sequence TARGPSFK (SEQ ID NO: 70). In some embodiments, the CM comprises the amino acid sequence LSGRSDNH (SEQ ID NO: 67). In some embodiments, the CM comprises the amino acid sequence GGWHTGRN (SEQ ID NO: 71). In some embodiments, the CM comprises the amino acid sequence HTGRSGAL (SEQ ID NO: 72). In some embodiments, the CM comprises the amino acid sequence PLTGRSGG (SEQ ID NO: 73). In some embodiments, the CM comprises the amino acid sequence AARGPAIH (SEQ ID NO: 74). In some embodiments, the CM comprises the amino acid sequence RGPAFNPM (SEQ ID NO: 75). In some embodiments, the CM comprises the amino acid sequence SSRGPAYL (SEQ ID NO: 76). In some embodiments, the CM comprises the amino acid sequence RGPATPIM (SEQ ID NO: 77). In some embodiments, the CM comprises the amino acid sequence RGPA (SEQ ID NO: 78). In some embodiments, the CM comprises the amino acid sequence GGQPSGMWGW (SEQ ID NO: 79). In some embodiments, the CM comprises the amino acid sequence FPRPLGITGL (SEQ ID NO: 80). In some embodiments, the CM comprises the amino acid sequence VHMPLGFLGP (SEQ ID NO: 81). In some embodiments, the CM comprises the amino acid sequence SPLTGRSG (SEQ ID NO: 82). In some embodiments, the CM comprises the amino acid sequence SAGFSLPA (SEQ ID NO: 83). In some embodiments, the CM comprises the amino acid sequence LAPLGLQRR (SEQ ID NO: 84). In some embodiments, the CM comprises the amino acid sequence SGGPLGVR (SEQ ID NO: 85). In some embodiments, the CM comprises the amino acid sequence PLGL (SEQ ID NO: 86).

[0099] In some embodiments, the CM is a substrate for an MMP and includes the sequence ISSGLLSS (SEQ ID NO: 321); QNQALRMA (SEQ ID NO: 322); AQNLLGMV (SEQ ID NO: 323); STFPFGMF (SEQ ID NO: 324); PVGYTSSL (SEQ ID NO: 325); DWLYWPGI (SEQ ID NO: 326); MIAPVAYR (SEQ ID NO: 327); RPSPMWAY (SEQ ID NO: 328); WATPRPMR (SEQ ID NO: 329); FRLLDWQW (SEQ ID NO: 330); LKAAPRWA (SEQ ID NO: 331); GPSHLVLT (SEQ ID NO: 332); LPGGLSPW (SEQ ID NO: 333); MGLFSEAG (SEQ ID NO: 334); SPLPLRVP (SEQ ID NO: 335); RMHLRSLG (SEQ ID NO: 336); LAAPLGLL (SEQ ID NO: 337); AVGLLAPP (SEQ ID NO: 338); LLAPSHRA (SEQ ID NO: 339); PAGLWLDP (SEQ ID NO: 340); and/or ISSGLSS (SEQ ID NO: 341).

[0100] In some embodiments, the CM comprises the amino acid sequence ISSGLLSS (SEQ ID NO: 321). In some embodiments, the CM comprises the amino acid sequence QNQALRMA (SEQ ID NO: 322). In some embodiments, the CM comprises the amino acid sequence AQNLLGMV (SEQ ID NO: 323). In some embodiments, the CM comprises the amino acid sequence STFPFGMF (SEQ ID NO: 324). In some embodiments, the CM comprises the amino acid sequence PVGYTSSL (SEQ ID NO: 325). In some embodiments, the CM comprises the amino acid sequence DWLYWPGI (SEQ ID NO: 326). In some embodiments, the CM comprises the amino acid sequence MIAPVAYR (SEQ ID NO: 327). In some embodiments, the CM comprises the amino acid sequence RPSPMWAY (SEQ ID NO: 328). In some embodiments, the CM comprises the amino acid sequence WATPRPMR (SEQ ID NO: 329). In some embodiments, the CM comprises the amino acid sequence FRLLDWQW (SEQ ID NO: 330). In some embodiments, the CM comprises the amino acid sequence LKAAPRWA (SEQ ID NO: 331). In some embodiments, the CM comprises the amino acid sequence GPSHLVLT (SEQ ID NO: 332). In some embodiments, the CM comprises the amino acid sequence LPGGLSPW (SEQ ID NO: 333). In some embodiments, the CM comprises the amino acid sequence MGLFSEAG (SEQ ID NO: 334). In some embodiments, the CM comprises the amino acid sequence SPLPLRVP (SEQ ID NO: 335). In some embodiments, the CM comprises the amino acid sequence RMHLRSLG (SEQ ID NO: 336). In some embodiments, the CM comprises the amino acid sequence LAAPLGLL (SEQ ID NO: 337). In some embodiments, the CM comprises the amino acid sequence AVGLLAPP (SEQ ID NO: 338). In some embodiments, the CM comprises the amino acid sequence LLAPSHRA (SEQ ID NO: 339). In some embodiments, the CM comprises the amino acid sequence PAGLWLDP (SEQ ID NO: 340). In some embodiments, the CM comprises the amino acid sequence ISSGLSS (SEQ ID NO: 341).

[0101] In some embodiments, the CM is a substrate for thrombin. In some embodiments, the CM is a substrate for thrombin and includes the sequence GPRSFGL (SEQ ID NO: 896) or GPRSFG (SEQ ID NO: 897). In some embodiments, the CM comprises the amino acid sequence GPRSFGL (SEQ ID NO: 896). In some embodiments, the CM comprises the amino acid sequence GPRSFG (SEQ ID NO: 897).

[0102] In some embodiments, the CM comprises an amino acid sequence selected from the group consisting of NTLSGRSENHSG (SEQ ID NO: 898); NTLSGRSGNHGS (SEQ ID NO: 899); TSTSGRSANPRG (SEQ ID NO: 900); TSGRSANP (SEQ ID NO: 901); VAGRSMRP (SEQ ID NO: 902); VVPEGRRS (SEQ ID NO: 903); ILPRSPAF (SEQ ID NO: 904); MVLGRSLL (SEQ ID NO: 905); QGRAITFI (SEQ ID NO: 906); SPRSIMLA (SEQ ID NO: 907); and SMLRSMPL (SEQ ID NO: 908).

[0103] In some embodiments, the CM comprises the amino acid sequence NTLSGRSENHSG (SEQ ID NO: 898). In some embodiments, the CM comprises the amino acid sequence NTLSGRSGNHGS (SEQ ID NO: 899). In some embodiments, the CM comprises the amino acid sequence TSTSGRSANPRG (SEQ ID NO: 900). In some embodiments, the CM comprises the amino acid sequence TSGRSANP (SEQ ID NO: 901). In some embodiments, the CM comprises the amino acid sequence VAGRSMRP (SEQ ID NO: 902). In some embodiments, the CM comprises the amino acid sequence VVPEGRRS (SEQ ID NO: 903). In some embodiments, the CM comprises the amino acid sequence ILPRSPAF (SEQ ID NO: 904). In some embodiments, the CM comprises the amino acid sequence MVLGRSLL (SEQ ID NO: 905). In some embodiments, the CM comprises the amino acid sequence QGRAITFI (SEQ ID NO: 906). In some embodiments, the CM comprises the amino acid sequence SPRSIMLA (SEQ ID NO: 907). In some embodiments, the CM comprises the amino acid sequence and SMLRSMPL (SEQ ID NO: 908).

[0104] In some embodiments, the CM is a substrate for a neutrophil elastase. In some embodiments, the CM is a substrate for a serine protease. In some embodiments, the CM is a substrate for uPA. In some embodiments, the CM is a substrate for legumain. In some embodiments, the CM is a substrate for matriptase. In some embodiments, the CM is a substrate for a cysteine protease. In some embodiments, the CM is a substrate for a cysteine protease, such as a cathepsin.

[0105] In some embodiments, the CM is a CM1-CM2 substrate and includes the sequence ISSGLLSGRSDNH (SEQ ID NO: 909); ISSGLLSSGGSGGSLSGRSDNH (SEQ ID NO: 910); AVGLLAPPGGTSTSGRSANPRG (SEQ ID NO: 911); TSTSGRSANPRGGGAVGLLAPP (SEQ ID NO: 912); VHMPLGFLGPGGTSTSGRSANPRG (SEQ ID NO: 913); TSTSGRSANPRGGGVHMPLGFLGP (SEQ ID NO: 914); AVGLLAPPGGLSGRSDNH (SEQ ID NO: 915); LSGRSDNHGGAVGLLAPP (SEQ ID NO: 916); VHMPLGFLGPGGLSGRSDNH (SEQ ID NO: 917); LSGRSDNHGGVHMPLGFLGP (SEQ ID NO: 918); LSGRSDNHGGSGGSISSGLLSS (SEQ ID NO: 919); LSGRSGNHGGSGGSISSGLLSS (SEQ ID NO: 920); ISSGLLSSGGSGGSLSGRSGNH (SEQ ID NO: 921); LSGRSDNHGGSGGSQNQALRMA (SEQ ID NO: 922); QNQALRMAGGSGGSLSGRSDNH (SEQ ID NO: 923); LSGRSGNHGGSGGSQNQALRMA (SEQ ID NO: 924); QNQALRMAGGSGGSLSGRSGNH (SEQ ID NO: 925) and/or ISSGLLSGRSGNH (SEQ ID NO: 926).

[0106] In some embodiments, the CM1-CM2 substrate includes the sequence ISSGLLSGRSDNH (SEQ ID NO: 909). In some embodiments, the CM1-CM2 substrate comprises the amino acid sequence ISSGLLSSGGSGGSLSGRSDNH (SEQ ID NO: 910). In some embodiments, the CM1-CM2 substrate comprises the amino acid sequence AVGLLAPPGGTSTSGRSANPRG (SEQ ID NO: 911). In some embodiments, the CM1-CM2 substrate comprises the amino acid sequence TSTSGRSANPRGGGAVGLLAPP (SEQ ID NO: 912). In some embodiments, the CM1-CM2 substrate comprises the amino acid sequence VHMPLGFLGPGGTSTSGRSANPRG (SEQ ID NO: 913). In some embodiments, the CM1-CM2 substrate comprises the amino acid sequence TSTSGRSANPRGGGVHMPLGFLGP (SEQ ID NO: 914). In some embodiments, the CM1-CM2 substrate comprises the amino acid sequence AVGLLAPPGGLSGRSDNH (SEQ ID NO: 915). In some embodiments, the CM1-CM2 substrate comprises the amino acid sequence LSGRSDNHGGAVGLLAPP (SEQ ID NO: 916). In some embodiments, the CM1-CM2 substrate comprises the amino acid sequence VHMPLGFLGPGGLSGRSDNH (SEQ ID NO: 917). In some embodiments, the CM1-CM2 substrate comprises the amino acid sequence LSGRSDNHGGVHMPLGFLGP (SEQ ID NO: 918). In some embodiments, the CM1-CM2 substrate comprises the amino acid sequence LSGRSDNHGGSGGSISSGLLSS (SEQ ID NO: 919). In some embodiments, the CM1-CM2 substrate comprises the amino acid sequence LSGRSGNHGGSGGSISSGLLSS (SEQ ID NO: 920). In some embodiments, the CM1-CM2 substrate comprises the amino acid sequence ISSGLLSSGGSGGSLSGRSGNH (SEQ ID NO: 921). In some embodiments, the CM1-CM2 substrate comprises the amino acid sequence LSGRSDNHGGSGGSQNQALRMA (SEQ ID NO: 922). In some embodiments, the CM1-CM2 substrate comprises the amino acid sequence QNQALRMAGGSGGSLSGRSDNH (SEQ ID NO: 923). In some embodiments, the CM1-CM2 substrate comprises the amino acid sequence LSGRSGNHGGSGGSQNQALRMA (SEQ ID NO: 924). In some embodiments, the CM1-CM2 substrate comprises the amino acid sequence QNQALRMAGGSGGSLSGRSGNH (SEQ ID NO: 925). In some embodiments, the CM1-CM2 substrate comprises the amino acid sequence ISSGLLSGRSGNH (SEQ ID NO: 926).

[0107] In some embodiments, the CM is a substrate for a protease selected from the group consisting of those shown in Table 3. In some embodiments, the protease is selected from the group consisting of uPA, legumain, matriptase, ADAM17, BMP-1, TMPRSS3, TMPRSS4, MMP-9, MMP-12, MMP-13, and MMP-14. In some embodiments, the protease is a cathepsin. In some embodiments, the CM is a substrate for a protease selected from the group consisting of uPA (urokinase plasminogen activator), legumain and matriptase. In some embodiments, the protease comprises uPA. In some embodiments, the protease comprises legumain. In some embodiments, the protease comprises matriptase. In some embodiments, the protease comprises a matrix metalloproteinase (MMP).

[0108] In some embodiments, the CM is a substrate for at least two proteases. In some embodiments, each protease is selected from the group consisting of those shown in Table 3. In some embodiments, the CM is a substrate for at least two proteases, wherein one of the proteases is selected from the group consisting of uPA, legumain and matriptase and the other protease is selected from the group consisting of those shown in Table 3. In some embodiments, the CM is a substrate for at least two proteases selected from the group consisting of uPA, legumain and matriptase.

[0109] In some embodiments, the activatable antibody includes at least a first CM and a second CM. In some embodiments, the first CM and the second CM are each polypeptides of no more than 15 amino acids long. In some embodiments, the first CM and the second CM in the activatable antibody in the uncleaved state have the structural arrangement from N-terminus to C-terminus as follows: MM-CM1-CM2-AB or AB-CM2-CM1-MM. In some embodiments, at least one of the first CM and the second CM is a polypeptide that functions as a substrate for a protease selected from the group consisting of uPA, legumain, and matriptase. In some embodiments, the first CM is cleaved by a first cleaving agent selected from the group consisting of uPA, legumain, and matriptase in a target tissue and the second CM is cleaved by a second cleaving agent in a target tissue. In some embodiments, the other protease is selected from the group consisting of those shown in Table 3. In some embodiments, the first cleaving agent and the second cleaving agent are the same protease selected from the group consisting of uPA, legumain, and matriptase, and the first CM and the second CM are different substrates for the protease. In some embodiments, the first cleaving agent and the second cleaving agent are the same protease selected from the group consisting of those shown in Table 3. In some embodiments, the first cleaving agent and the second cleaving agent are different proteases. In some embodiments, the first cleaving agent and the second cleaving agent are produced by a tumor that is in proximity to cells that express the target and/or produced by a tumor that is co-localized in the target tissue. In some embodiments, the first CM and the second CM are cleaved by at least one cleaving agent in the target tissue.

[0110] In some embodiments, the activatable antibody is exposed to and cleaved by a protease such that, when the activatable antibody is in the activated or cleaved state, the activated antibody includes a light chain amino acid sequence that includes at least a portion of LP2 and/or CM sequence after the protease has cleaved the CM.

[0111] In some embodiments, the MM and the CM include an amino acid sequence selected from the group consisting of those presented herein.

[0112] In some embodiments, the activatable antibody also includes a signal peptide. In some embodiments, the signal peptide is conjugated to the activatable antibody via a spacer. In some embodiments, the spacer is conjugated to the activatable antibody in the absence of a signal peptide. In some embodiments, the spacer is joined directly to the MM of the activatable antibody.

[0113] In some embodiments, the activatable antibody in an uncleaved state comprises a spacer that is joined directly to the MM and has the structural arrangement from N-terminus to C-terminus of spacer-MM-CM-AB. In some embodiments, the spacer includes at least the amino acid sequence QGQSGQG (SEQ ID NO: 407). In some embodiments, the spacer includes at least the amino acid sequence QGQSGQ (SEQ ID NO: 87). In some embodiments, the spacer includes at least the amino acid sequence QGQSG (SEQ ID NO: 408). In some embodiments, the spacer includes at least the amino acid sequence QGQS (SEQ ID NO: 409), In some embodiments, the spacer includes at least the amino acid sequence QGQ (SEQ ID NO: 410). In some embodiments, the spacer includes at least the amino acid sequence QG (SEQ ID NO: 411). In some embodiments, the spacer includes at least the amino acid residue Q. In some embodiments, the MM and spacer comprise an amino acid sequence selected from the sequences listed in Table 7 or Table 8.

[0114] In some embodiments, the activatable antibody includes a heavy chain sequence selected from the group consisting of SEQ ID NOs: 446, 452, 454, 456, 460, 462, 464, 466, 470, 472, 476, 478, 480, 486, 488, 490, 492, 494, 496, 498, 500, 502, 504, 510, 512, 514, 518, 524, 526, 530, 532, 534, 536, 538, 540, 542, 544, and 546.

[0115] In some embodiments, the activatable antibody includes a light chain sequence selected from the group consisting of SEQ ID NOs: 448, 450, 458, 468, 474, 482, 484, 508, 516, and 520.

[0116] In some embodiments, the activatable antibody includes a heavy chain sequence selected from the group consisting of SEQ ID NOs: 446, 452, 454, 456, 460, 462, 464, 466, 470, 472, 476, 478, 480, 486, 488, 490, 492, 494, 496, 498, 500, 502, 504, 510, 512, 514, 518, 524, 526, 530, 532, 534, 536, 538, 540, 542, 544, and 546; and a light chain sequence selected from the group consisting of SEQ ID NOs: 448, 450, 458, 468, 474, 482, 484, 508, 516, and 520.

[0117] In some embodiments, the activatable antibody includes a heavy chain sequence that is at least 90%, 91%, 92%, 93%, 94%, 95%, 96%, 97%, 98% or 99% identical to an amino acid sequence selected from the group consisting of SEQ ID NOs: 446, 452, 454, 456, 460, 462, 464, 466, 470, 472, 476, 478, 480, 486, 488, 490, 492, 494, 496, 498, 500, 502, 504, 510, 512, 514, 518, 524, 526, 530, 532, 534, 536, 538, 540, 542, 544, and 546.

[0118] In some embodiments, the activatable antibody includes a light chain sequence that is at least 90%, 91%, 92%, 93%, 94%, 95%, 96%, 97%, 98% or 99% identical to an amino acid sequence selected from the group consisting of SEQ ID NOs: 448, 450, 458, 468, 474, 482, 484, 508, 516, and 520.

[0119] In some embodiments, the activatable antibody includes a heavy chain sequence that is at least 90%, 91%, 92%, 93%, 94%, 95%, 96%, 97%, 98% or 99% identical to an amino acid sequence selected from the group consisting of SEQ ID NOs: 446, 452, 454, 456, 460, 462, 464, 466, 470, 472, 476, 478, 480, 486, 488, 490, 492, 494, 496, 498, 500, 502, 504, 510, 512, 514, 518, 524, 526, 530, 532, 534, 536, 538, 540, 542, 544, and 546; and a light chain sequence that is at least 90%, 91%, 92%, 93%, 94%, 95%, 96%, 97%, 98% or 99% identical to an amino acid sequence selected from the group consisting of SEQ ID NOs: 448, 450, 458, 468, 474, 482, 484, 508, 516, and 520.

[0120] In some embodiments, the activatable antibody includes the amino acid sequence of SEQ ID NO: 506. In some embodiments, the activatable antibody includes an amino acid sequence that is at least 90%, 91%, 92%, 93%, 94%, 95%, 96%, 97%, 98% or 99% identical to the amino acid sequence of SEQ ID NO: 506.

[0121] In some embodiments, the activatable antibody includes the amino acid sequence of SEQ ID NO: 587 or SEQ ID NO: 588. In some embodiments, the activatable antibody includes an amino acid sequence that is at least 90%, 91%, 92%, 93%, 94%, 95%, 96%, 97%, 98% or 99% identical to the amino acid sequence of SEQ ID NO: 587 or SEQ ID NO: 588.

[0122] In some embodiments, the activatable antibody also includes an agent conjugated to the AB. In some embodiments, the agent is a therapeutic agent. In some embodiments, the agent is a detectable moiety. In some embodiments, the detectable moiety is a diagnostic agent. In some embodiments, the agent is conjugated to the AB via a linker. In some embodiments, the linker is a cleavable linker. In some embodiments, the linker is a non-cleavable linker.

[0123] In some embodiments, the activatable antibody also includes a detectable moiety. In some embodiments, the detectable moiety is a diagnostic agent.

[0124] In some embodiments, the AB of the activatable antibody naturally contains one or more disulfide bonds. In some embodiments, the AB can be engineered to include one or more disulfide bonds.

[0125] In some embodiments, the serum half-life of the multispecific activatable antibody is longer than that of the corresponding multispecific antibody; e.g., the pK of the multispecific activatable antibody is longer than that of the corresponding multispecific antibody. In some embodiments, the serum half-life of the multispecific activatable antibody is similar to that of the corresponding multispecific antibody. In some embodiments, the serum half-life of the multispecific activatable antibody is at least 15 days when administered to an organism. In some embodiments, the serum half-life of the multispecific activatable antibody is at least 12 days when administered to an organism. In some embodiments, the serum half-life of the multispecific activatable antibody is at least 11 days when administered to an organism. In some embodiments, the serum half-life of the multispecific activatable antibody is at least 10 days when administered to an organism. In some embodiments, the serum half-life of the multispecific activatable antibody is at least 9 days when administered to an organism. In some embodiments, the serum half-life of the multispecific activatable antibody is at least 8 days when administered to an organism. In some embodiments, the serum half-life of the multispecific activatable antibody is at least 7 days when administered to an organism. In some embodiments, the serum half-life of the multispecific activatable antibody is at least 6 days when administered to an organism. In some embodiments, the serum half-life of the activatable antibody is at least 5 days when administered to an organism. In some embodiments, the serum half-life of the activatable antibody is at least 4 days when administered to an organism. In some embodiments, the serum half-life of the activatable antibody is at least 3 days when administered to an organism. In some embodiments, the serum half-life of the activatable antibody is at least 2 days when administered to an organism. In some embodiments, the serum half-life of the activatable antibody is at least 24 hours when administered to an organism. In some embodiments, the serum half-life of the activatable antibody is at least 20 hours when administered to an organism. In some embodiments, the serum half-life of the activatable antibody is at least 18 hours when administered to an organism. In some embodiments, the serum half-life of the activatable antibody is at least 16 hours when administered to an organism. In some embodiments, the serum half-life of the activatable antibody is at least 14 hours when administered to an organism. In some embodiments, the serum half-life of the activatable antibody is at least 12 hours when administered to an organism. In some embodiments, the serum half-life of the activatable antibody is at least 10 hours when administered to an organism. In some embodiments, the serum half-life of the activatable antibody is at least 8 hours when administered to an organism. In some embodiments, the serum half-life of the activatable antibody is at least 6 hours when administered to an organism. In some embodiments, the serum half-life of the activatable antibody is at least 4 hours when administered to an organism. In some embodiments, the serum half-life of the activatable antibody is at least 3 hours when administered to an organism.

[0126] In some embodiments, the activatable anti-CD3ε antibody is monospecific. In some embodiments, the activatable anti-CD3ε antibody is multispecific, e.g., by way of non-limiting example, bispecific or trifunctional. In some embodiments, the activatable anti-CD3ε antibody is formulated as part of a pro-Bispecific T Cell Engager (BITE) molecule. In some embodiments, the activatable anti-CD3ε antibody is formulated as part of a pro-Chimeric Antigen Receptor (CAR) modified T cell or other engineered receptor.

[0127] The compositions and methods provided herein enable the attachment of one or more agents to one or more cysteine residues in the AB without compromising the activity (e.g., the masking, activating or binding activity) of the activatable anti-CD3ε antibody. In some embodiments, the compositions and methods provided herein enable the attachment of one or more agents to one or more cysteine residues in the AB without reducing or otherwise disturbing one or more disulfide bonds within the MM. The compositions and methods provided herein produce an activatable anti-CD3ε antibody that is conjugated to one or more agents, e.g., any of a variety of therapeutic, diagnostic and/or prophylactic agents, preferably without any of the agent(s) being conjugated to the MM of the activatable anti-CD3ε antibody. The compositions and methods provided herein produce conjugated activatable anti-CD3ε antibodies in which the MM retains the ability to effectively and efficiently mask the AB of the activatable antibody in an uncleaved state. The compositions and methods provided herein produce conjugated activatable anti-CD3ε antibodies in which the activatable antibody is still activated, i.e., cleaved, in the presence of a protease that can cleave the CM.

[0128] In some embodiments, the anti-CD3ε antibodies and/or the activatable anti-CD3ε antibodies described herein are used in conjunction with one or more additional agents or a combination of additional agents. Suitable additional agents include current pharmaceutical and/or surgical therapies for an intended application, such as, for example, cancer. For example, the anti-CD3ε antibodies and/or activatable anti-CD3ε antibodies can be used in conjunction with an additional chemotherapeutic or anti-neoplastic agent.

[0129] In some embodiments, the anti-CD3ε antibody and/or activatable anti-CD3ε antibody and additional agent are formulated into a single therapeutic composition, and the anti-CD3ε antibody and/or activatable anti-CD3ε antibody and additional agent are administered simultaneously. In some embodiments, the anti-CD3ε antibody and/or activatable anti-CD3ε antibody and additional agent are separate from each other, e.g., each is formulated into a separate therapeutic composition, and the anti-CD3ε antibody and/or activatable anti-CD3ε antibody and the additional agent are administered simultaneously, or the anti-CD3ε antibody and/or activatable anti-CD3ε antibody and the additional agent are administered at different times during a treatment regimen. For example, the anti-CD3ε antibody and/or activatable anti-CD3ε antibody is administered prior to the administration of the additional agent, the anti-CD3ε antibody and/or activatable anti-CD3ε antibody is administered subsequent to the administration of the additional agent, or the anti-CD3ε antibody and/or activatable anti-CD3ε antibody and the additional agent are administered in an alternating fashion. As described herein, the anti-CD3ε antibody and/or activatable anti-CD3ε antibody and additional agent are administered in single doses or in multiple doses.

[0130] The disclosure also provides an isolated nucleic acid molecule encoding at least a portion of an activatable anti-CD3ε antibody described herein, as well as vectors that include these isolated nucleic acid sequences and/or one or more nucleic acid molecules encoding an anti-CD3ε antibody described herein, such as for example, at least a first nucleic acid encoding at least a portion of the heavy chain of the activatable antibody and a second nucleic acid encoding at least a portion of the light chain of the activatable antibody. The disclosure provides methods of producing an activatable antibody by culturing a cell under conditions that lead to expression of the activatable antibody, wherein the cell comprises such a nucleic acid molecule(s). In some embodiments, the cell comprises such a vector.

[0131] In some embodiments, the activatable antibody is encoded by a heavy chain nucleic acid sequence selected from the group consisting of SEQ ID NOs: 445, 451, 453, 455, 459, 461, 463, 465, 469, 471, 475, 477, 479, 485, 487, 489, 491, 493, 495, 497, 499, 501, 503, 511, 513, 517, 522, 525, 529, 531, 533, 535, 537, 539, 541, 543, and 545.

[0132] In some embodiments, the activatable antibody is encoded by a light chain nucleic acid selected from the group consisting of SEQ ID NOs: 447, 449, 457, 467, 473, 481, 483, 507, 515, and 519.

[0133] In some embodiments, the activatable antibody is encoded by a heavy chain nucleic acid sequence selected from the group consisting of SEQ ID NOs: 445, 451, 453, 455, 459, 461, 463, 465, 469, 471, 475, 477, 479, 485, 487, 489, 491, 493, 495, 497, 499, 501, 503, 511, 513, 517, 522, 525, 529, 531, 533, 535, 537, 539, 541, 543, and 545; and a light chain nucleic acid sequence selected from the group consisting of SEQ ID NOs: 447, 449, 457, 467, 473, 481, 483, 507, 515, and 519.

[0134] In some embodiments, the activatable antibody is encoded by a heavy chain nucleic acid sequence that is at least 90%, 91%, 92%, 93%, 94%, 95%, 96%, 97%, 98% or 99% identical to a sequence selected from the group consisting of SEQ ID NOs: 445, 451, 453, 455, 459, 461, 463, 465, 469, 471, 475, 477, 479, 485, 487, 489, 491, 493, 495, 497, 499, 501, 503, 511, 513, 517, 522, 525, 529, 531, 533, 535, 537, 539, 541, 543, and 545.

[0135] In some embodiments, the activatable antibody is encoded by a light nucleic acid sequence that is at least 90%, 91%, 92%, 93%, 94%, 95%, 96%, 97%, 98% or 99% identical to a sequence selected from the group consisting of SEQ ID NOs: 447, 449, 457, 467, 473, 481, 483, 507, 515, and 519.

[0136] In some embodiments, the activatable antibody is encoded by a heavy chain nucleic acid sequence that is at least 90%, 91%, 92%, 93%, 94%, 95%, 96%, 97%, 98% or 99% identical to a sequence selected from the group consisting of SEQ ID NOs: 445, 451, 453, 455, 459, 461, 463, 465, 469, 471, 475, 477, 479, 485, 487, 489, 491, 493, 495, 497, 499, 501, 503, 511, 513, 517, 522, 525, 529, 531, 533, 535, 537, 539, 541, 543, and 545; and a light chain sequence that is at least 90%, 91%, 92%, 93%, 94%, 95%, 96%, 97%, 98% or 99% identical to a sequence selected from the group consisting of SEQ ID NOs: 447, 449, 457, 467, 473, 481, 483, 507, 515, and 519.

[0137] In some embodiments, the activatable antibody is encoded by a nucleic acid that includes the nucleic acid sequence of SEQ ID NO: 505. In some embodiments, the activatable antibody includes a nucleic acid sequence that is at least 90%, 91%, 92%, 93%, 94%, 95%, 96%, 97%, 98% or 99% identical to the sequence of SEQ ID NO: 505.

[0138] The disclosure also provides a method of manufacturing activatable antibodies that binds CD3ε in an activated state by (a) culturing a cell comprising a nucleic acid construct that encodes the activatable antibody under conditions that lead to expression of the activatable antibody, wherein the activatable antibody comprises a masking moiety (MM), a cleavable moiety (CM), and an antibody or an antigen binding fragment thereof (AB) that specifically binds CD3ε, and (b) recovering the activatable antibody.

[0139] The disclosure also provides a method of manufacturing activatable antibodies that binds CD3ε in an activated state by (a) culturing a cell comprising a nucleic acid construct that encodes the activatable antibody under conditions that lead to expression of the activatable antibody, wherein the activatable antibody comprises a masking moiety (MM), a cleavable moiety (CM), and an antibody or an antigen binding fragment thereof (AB) that specifically binds CD3ε, (i) wherein the CM is a polypeptide that includes an amino acid sequence that functions as a substrate for a protease; and (ii) wherein the CM is positioned in the activatable antibody such that, when the activatable antibody is in an uncleaved state, the MM interferes with specific binding of the AB to CD3 and when the activatable antibody is in a cleaved state the MM does not interfere or compete with specific binding of the AB to CD3ε; and (b) recovering the activatable antibody.

[0140] The disclosure also provides multispecific antibodies that bind the epsilon chain of CD3 (CD3ε) and a second target, wherein the antibody comprises a first antibody or antigen-binding fragment thereof (AB1) that binds the epsilon chain of CD3 (CD3ε) and a second antibody or antigen-binding fragment thereof (AB2) that binds a second target, and wherein AB1 comprises a VH CDR1 sequence that includes an amino acid sequence that is at least 90%, 91%, 92%, 93%, 94%, 95%, 96%, 97%, 98%, 99% or more identical to the amino acid sequence TYAMN (SEQ ID NO: 53); a VH CD2 sequence that includes an amino acid sequence that is at least 90%, 91%, 92%, 93%, 94%, 95%, 96%, 97%, 98%, 99% or more identical to the amino acid sequence RIRSKYNNYATYYADSVKD (SEQ ID NO: 54); a VH CDR3 sequence that includes an amino acid sequence that is at least 90%, 91%, 92%, 93%, 94%, 95%, 96%, 97%, 98%, 99% or more identical to the amino acid sequence HGNFGNSYVSWFAY (SEQ ID NO: 55), and a combination of a VL CDR1 sequence, a VL CDR2 sequence, and a VL CDR3 sequence, wherein at least one of the VL CDR1 sequence, the VL CDR2 sequence, and the VL CDR3 sequence is selected from a VL CDR1 sequence that includes an amino acid sequence that is at least 90%, 91%, 92%, 93%, 94%, 95%, 96%, 97%, 98%, 99% or more identical to the amino acid sequence RSSTGAVTTSNYAN (SEQ ID NO: 56); a VL CDR2 sequence that includes an amino acid sequence that is at least 90%, 91%, 92%, 93%, 94%, 95%, 96%, 97%, 98%, 99% or more identical to the amino acid sequence GTNKRAP (SEQ ID NO: 57); and a VL CDR3 sequence that includes an amino acid sequence that is at least 90%, 91%, 92%, 93%, 94%, 95%, 96%, 97%, 98%, 99% or more identical to the amino acid sequence ALWYSNLWV (SEQ ID NO: 58).

[0141] In some embodiments, the multispecific anti-CD3ε antibody or antigen-binding fragment thereof includes a VH CDR1 sequence that includes at least the amino acid sequence TYAMN (SEQ ID NO: 53); a VH CD2 sequence that includes at least the amino acid sequence RIRSKYNNYATYYADSVKD (SEQ ID NO: 54); a VH CDR3 sequence that includes at least the amino acid sequence HGNFGNSYVSWFAY (SEQ ID NO: 55), a VL CDR1 sequence that includes at least the amino acid sequence RSSTGAVTTSNYAN (SEQ ID NO: 56); a VL CDR2 sequence that includes at least the amino acid sequence GTNKRAP (SEQ ID NO: 57); and a VL CDR3 sequence that includes at least the amino acid sequence ALWYSNLWV (SEQ ID NO: 58).

[0142] In some embodiments, AB1 comprises a variable heavy chain (Hv) comprising the amino acid sequence of SEQ ID NO: 4 and a variable light chain (Lv) comprising the amino acid sequence of SEQ ID NO: 2.

[0143] In some embodiments, AB1 comprises a variable heavy chain (Hv) comprising an amino acid sequence that is at least 90%, 91%, 92%, 93%, 94%, 95%, 96%, 97%, 98%, 99% or more identical to the amino acid sequence of SEQ ID NO: 4 and a variable light chain (Lv) comprising an amino acid sequence that is at least 90%, 91%, 92%, 93%, 94%, 95%, 96%, 97%, 98%, 99% or more identical to the amino acid sequence of SEQ ID NO: 2.

[0144] In some embodiments, AB1 comprises a scFv fragment. In some embodiments, the scFv fragment comprises the amino acid sequence of SEQ ID NO: 6. In some embodiments, the scFv fragment comprises the amino acid sequence of SEQ ID NO: 30. In some embodiments, the scFv fragment comprises an amino acid sequence that is at least 90%, 91%, 92%, 93%, 94%, 95%, 96%, 97%, 98%, 99% or more identical to the amino acid sequence of SEQ ID NO: 6. In some embodiments, the scFv fragment comprises an amino acid sequence that is at least 90%, 91%, 92%, 93%, 94%, 95%, 96%, 97%, 98%, 99% or more identical to the amino acid sequence of SEQ ID NO: 30.

[0145] In some embodiments, the multispecific antibody includes an agent conjugated to the antibody. In some embodiments, the agent is a therapeutic agent, a detectable moiety or a diagnostic agent. In some embodiments, the agent is conjugated to the antibody via a linker. In some embodiments, the linker is a cleavable linker. In some embodiments, the linker is a non-cleavable linker. In some embodiments, the linker is a non-cleavable linker.

[0146] The present disclosure also provides multispecific antibodies and multispecific activatable antibodies that bind at least CD3ε. The multispecific antibodies provided herein are antibodies that recognize two or more different antigens or epitopes, where at least one antigen or epitope is CD3ε. The multispecific activatable antibodies provided herein are multispecific antibodies that include at least one masking moiety (MM) linked to at least one antigen- or epitope-binding domain of the multispecific antibody such that coupling of the MM reduces the ability of the antigen- or epitope-binding domain to bind its target. In some embodiments, the MM is coupled to the antigen- or epitope-binding domain of the multispecific antibody via a cleavable moiety (CM) that functions as a substrate for a protease. The activatable multispecific antibodies provided herein are stable in circulation, activated at intended sites of therapy and/or diagnosis but not in normal, i.e., healthy tissue, and, when activated, exhibit binding to a target that is at least comparable to the corresponding, unmodified multispecific antibody.

[0147] In some embodiments, the multispecific antibodies and/or multispecific activatable antibodies are designed to engage immune effector cells, also referred to herein as immune effector cell engaging multispecific antibodies and/or immune effector cell engaging multispecific activatable antibodies. In some embodiments, the multispecific antibodies and/or multispecific activatable antibodies are designed to engage leukocytes, also referred to herein as leukocyte engaging multispecific antibodies and/or leukocyte engaging multispecific activatable antibodies. In some embodiments, the multispecific antibodies and/or multispecific activatable antibodies are designed to engage T cells, also referred to herein as T-cell engaging multispecific antibodies and/or T-cell engaging multispecific activatable antibodies. In some embodiments, the multispecific antibodies and/or multispecific activatable antibodies engage a surface antigen on a leukocyte, such as on a T cell, on a natural killer (NK) cell, on a myeloid mononuclear cell, on a macrophage, and/or on another immune effector cell. In some embodiments, the immune effector cell is a leukocyte. In some embodiments, the immune effector cell is a T cell. In some embodiments, the immune effector cell is a NK cell. In some embodiments, the immune effector cell is a mononuclear cell, such as a myeloid mononuclear cell. In some embodiments, the T-cell engaging multispecific antibodies and/or T-cell engaging multispecific activatable antibodies bind CD3ε.

[0148] In some embodiments, the immune effector cell engaging multispecific antibodies include a targeting antibody or antigen-binding fragment thereof and an immune effector cell engaging antibody or antigen-binding portion thereof that includes an anti-CD3ε antibody or antigen-binding fragment thereof. In some embodiments, the immune effector cell engaging multispecific antibodies include a cancer targeting antibody or antigen-binding fragment thereof and an immune effector cell engaging antibody or antigen-binding portion thereof. In some embodiments, the immune effector cell engaging multispecific antibodies include a cancer targeting IgG antibody or antigen-binding fragment thereof and an immune effector cell engaging scFv. In some embodiments, the immune effector cell is a leukocyte. In some embodiments, the immune effector cell is a T cell. In some embodiments, the immune effector cell is a NK cell. In some embodiments, the immune effector cell is a myeloid mononuclear cell.

[0149] In some embodiments, the T-cell engaging multispecific antibody includes an anti-CD3ε antibody or antigen-binding fragment thereof and a targeting antibody or antigen-binding fragment thereof. In some embodiments, the T-cell engaging multispecific antibody includes an anti-CD3ε scFv and a targeting antibody or antigen-binding fragment thereof. In some embodiments, the T-cell engaging multispecific antibody includes an anti-CD3ε antibody or antigen-binding fragment thereof and a cancer-targeting antibody or antigen-binding fragment thereof. In some embodiments, the T-cell engaging multispecific antibody includes an anti-CD3ε scFv and a cancer targeting antibody or antigen-binding fragment thereof. In some embodiments, the T-cell engaging multispecific antibody includes an anti-CD3ε antibody or antigen-binding fragment thereof and a cancer-targeting IgG antibody or antigen-binding fragment thereof. In some embodiments, the T-cell engaging multispecific antibody includes an anti-CD3ε scFv and a cancer targeting IgG antibody or antigen-binding fragment thereof. In some embodiments, the T-cell engaging multispecific antibody includes an anti-CD3 epsilon (CD3ε) scFv that is derived from OKT3. In some embodiments, the T-cell engaging multispecific antibody includes an anti-CD3 epsilon (CD3ε) scFv that is derived from SP34 (available from BD Biosciences Cat#556610).

[0150] In some embodiments, the T-cell engaging multispecific activatable antibodies include a targeting antibody or antigen-binding fragment thereof and anti-CD3ε antibody or antigen-binding fragment thereof, where at least one of the targeting antibody or antigen-binding fragment thereof and/or the anti-CD3ε antibody or antigen-binding portion thereof is masked. In some embodiments, the anti-CD3ε antibody or antigen binding fragment thereof includes a first antibody or antigen-binding fragment thereof (AB1) that binds CD3ε, where the AB1 is attached to a masking moiety (MM1) such that coupling of the MM1 reduces the ability of the AB1 to bind CD3ε. In some embodiments, the targeting antibody or antigen-binding fragment thereof includes a second antibody or fragment thereof that includes a second antibody or antigen-binding fragment thereof (AB2) that binds a second target, where the AB2 is attached to a masking moiety (MM2) such that coupling of the MM2 reduces the ability of the AB2 to bind the second target. In some embodiments, the anti-CD3ε antibody or antigen binding fragment thereof includes a first antibody or antigen-binding fragment thereof (AB1) that binds CD3ε, where the AB1 is attached to a masking moiety (MM1) such that coupling of the MM1 reduces the ability of the AB1 to bind CD3ε, and the targeting antibody or antigen-binding fragment thereof includes a second antibody or fragment thereof that includes a second antibody or antigen-binding fragment thereof (AB2) that binds a second target, where the AB2 is attached to a masking moiety (MM2) such that coupling of the MM2 reduces the ability of the AB2 to bind the second target.

[0151] In some embodiments, the T-cell engaging multispecific activatable antibodies include a cancer targeting antibody or antigen-binding fragment thereof and an anti-CD3ε antibody or antigen-binding portion thereof, where at least one of the cancer targeting antibody or antigen-binding fragment thereof and/or the anti-CD3ε antibody or antigen-binding portion thereof is masked. In some embodiments, the anti-CD3ε antibody or antigen binding fragment thereof includes a first antibody or antigen-binding fragment thereof (AB1) that binds CD3ε, where the AB1 is attached to a masking moiety (MM1) such that coupling of the MM1 reduces the ability of the AB1 to bind CD3ε. In some embodiments, the cancer targeting antibody or antigen-binding fragment thereof includes a second antibody or fragment thereof that includes a second antibody or antigen-binding fragment thereof (AB2) that binds a second, cancer-related target, where the AB2 is attached to a masking moiety (MM2) such that coupling of the MM2 reduces the ability of the AB2 to bind the second, cancer-related target. In some embodiments, the anti-CD3ε antibody or antigen binding fragment thereof includes a first antibody or antigen-binding fragment thereof (AB1) that binds CD3ε, where the AB1 is attached to a masking moiety (MM1) such that coupling of the MM1 reduces the ability of the AB1 to bind CD3ε, and the cancer targeting antibody or antigen-binding fragment thereof includes a second antibody or fragment thereof that includes a second antibody or antigen-binding fragment thereof (AB2) that binds a second, cancer-related target, where the AB2 is attached to a masking moiety (MM2) such that coupling of the MM2 reduces the ability of the AB2 to bind the second, cancer-related target.

[0152] In some embodiments, the T-cell engaging multispecific activatable antibodies include a cancer targeting IgG antibody or antigen-binding fragment thereof and an anti-CD3ε, where at least one of the cancer targeting IgG antibody or antigen-binding fragment thereof and/or the anti-CD3ε antibody or antigen-binding portion thereof is masked. In some embodiments, the anti-CD3ε antibody or antigen binding fragment thereof includes a first antibody or antigen-binding fragment thereof (AB1) that binds CD3ε, where the AB1 is attached to a masking moiety (MM1) such that coupling of the MM1 reduces the ability of the AB1 to bind CD3ε. In some embodiments, the cancer targeting IgG antibody or antigen-binding fragment thereof includes a second antibody or fragment thereof that includes a second antibody or antigen-binding fragment thereof (AB2) that binds a second, cancer-related target, where the AB2 is attached to a masking moiety (MM2) such that coupling of the MM2 reduces the ability of the AB2 to bind the second, cancer-related target. In some embodiments, the anti-CD3ε antibody or antigen binding fragment thereof includes a first antibody or antigen-binding fragment thereof (AB1) that binds CD3ε, where the AB1 is attached to a masking moiety (MM1) such that coupling of the MM1 reduces the ability of the AB1 to bind CD3ε, and the cancer targeting IgG antibody or antigen-binding fragment thereof includes a second antibody or fragment thereof that includes a second antibody or antigen-binding fragment thereof (AB2) that binds a second, cancer-related target, where the AB2 is attached to a masking moiety (MM2) such that coupling of the MM2 reduces the ability of the AB2 to bind the second, cancer-related target.

[0153] In some embodiments, the T-cell engaging multispecific activatable antibody includes an anti-CD3ε scFv and a targeting antibody or antigen-binding fragment thereof, where at least one of the anti-CD3ε scFv and/or the targeting antibody or antigen-binding portion thereof is masked. In some embodiments, the CD3ε scFv includes a first antibody or antigen-binding fragment thereof (AB1) that binds CD3ε, where the AB1 is attached to a masking moiety (MM1) such that coupling of the MM1 reduces the ability of the AB1 to bind CD3ε. In some embodiments, the targeting antibody or antigen-binding fragment thereof includes a second antibody or fragment thereof that includes a second antibody or antigen-binding fragment thereof (AB2) that binds a second target, where the AB2 is attached to a masking moiety (MM2) such that coupling of the MM2 reduces the ability of the AB2 to bind the second target. In some embodiments, the CD3ε scFv includes a first antibody or antigen-binding fragment thereof (AB1) that binds CD3ε, where the AB1 is attached to a masking moiety (MM1) such that coupling of the MM1 reduces the ability of the AB1 to bind CD3ε, and the targeting antibody or antigen-binding fragment thereof includes a second antibody or fragment thereof that includes a second antibody or antigen-binding fragment thereof (AB2) that binds a second target, where the AB2 is attached to a masking moiety (MM2) such that coupling of the MM2 reduces the ability of the AB2 to bind the second target.

[0154] In some embodiments, the T-cell engaging multispecific activatable antibody includes an anti-CD3ε scFv and a cancer targeting antibody or antigen-binding fragment thereof, where at least one of the anti-CD3ε scFv and/or the cancer targeting antibody or antigen-binding portion thereof is masked. In some embodiments, the CD3ε scFv includes a first antibody or antigen-binding fragment thereof (AB1) that binds CD3ε, where the AB1 is attached to a masking moiety (MM1) such that coupling of the MM1 reduces the ability of the AB1 to bind CD3ε. In some embodiments, the cancer targeting antibody or antigen-binding fragment thereof includes a second antibody or fragment thereof that includes a second antibody or antigen-binding fragment thereof (AB2) that binds a second, cancer-related target, where the AB2 is attached to a masking moiety (MM2) such that coupling of the MM2 reduces the ability of the AB2 to bind the second, cancer-related target. In some embodiments, the CD3ε scFv includes a first antibody or antigen-binding fragment thereof (AB1) that binds CD3ε, where the AB1 is attached to a masking moiety (MM1) such that coupling of the MM1 reduces the ability of the AB1 to bind CD3ε, and the cancer targeting antibody or antigen-binding fragment thereof includes a second antibody or fragment thereof that includes a second antibody or antigen-binding fragment thereof (AB2) that binds a second, cancer-related target, where the AB2 is attached to a masking moiety (MM2) such that coupling of the MM2 reduces the ability of the AB2 to bind the second, cancer-related target.

[0155] In some embodiments, the T-cell engaging multispecific activatable antibody includes an anti-CD3ε scFv and a cancer targeting IgG antibody or antigen-binding fragment thereof, where at least one of the anti-CD3ε scFv and/or the cancer targeting IgG antibody or antigen-binding portion thereof is masked. In some embodiments, the CD3ε scFv includes a first antibody or antigen-binding fragment thereof (AB1) that binds CD3ε, where the AB1 is attached to a masking moiety (MM1) such that coupling of the MM1 reduces the ability of the AB1 to bind CD3ε. In some embodiments, the cancer targeting IgG antibody or antigen-binding fragment thereof includes a second antibody or fragment thereof that includes a second antibody or antigen-binding fragment thereof (AB2) that binds a second, cancer-related target, where the AB2 is attached to a masking moiety (MM2) such that coupling of the MM2 reduces the ability of the AB2 to bind the second, cancer-related target. In some embodiments, the CD3ε scFv includes a first antibody or antigen-binding fragment thereof (AB1) that binds CD3ε, where the AB1 is attached to a masking moiety (MM1) such that coupling of the MM1 reduces the ability of the AB1 to bind CD3ε, and the cancer targeting antibody IgG or antigen-binding fragment thereof includes a second antibody or fragment thereof that includes a second antibody or antigen-binding fragment thereof (AB2) that binds a second, cancer-related target, where the AB2 is attached to a masking moiety (MM2) such that coupling of the MM2 reduces the ability of the AB2 to bind the second, cancer-related target.

[0156] In some embodiments, the T-cell engaging multispecific activatable antibody includes an anti-CD3 epsilon (CD3ε) scFv that is derived from OKT3, where at least one of the targeting antibody or antigen-binding fragment thereof and/or the OKT3 scFv or OKT3-derived scFv is masked. In some embodiments, the OKT3 scFv or OKT3-derived scFv includes a first antibody or antigen-binding fragment thereof (AB1) that binds CD3ε, where the AB1 is attached to a masking moiety (MM1) such that coupling of the MM1 reduces the ability of the AB1 to bind CD3ε. In some embodiments, the targeting antibody or antigen-binding fragment thereof includes a second antibody or fragment thereof that includes a second antibody or antigen-binding fragment thereof (AB2) that binds a second target, where the AB2 is attached to a masking moiety (MM2) such that coupling of the MM2 reduces the ability of the AB2 to bind the second target. In some embodiments, the OKT3 scFv or OKT3-derived scFv includes a first antibody or antigen-binding fragment thereof (AB1) that binds CD3ε, where the AB1 is attached to a masking moiety (MM1) such that coupling of the MM1 reduces the ability of the AB1 to bind CD3ε, and the targeting antibody or antigen-binding fragment thereof includes a second antibody or fragment thereof that includes a second antibody or antigen-binding fragment thereof (AB2) that binds a second target, where the AB2 is attached to a masking moiety (MM2) such that coupling of the MM2 reduces the ability of the AB2 to bind the second target.

[0157] In some embodiments, the T-cell engaging multispecific activatable antibody includes an OKT3 scFv or OKT3-derived scFv and a cancer targeting antibody or antigen-binding fragment thereof, where at least one of the OKT3 scFv or OKT3-derived scFv and/or the cancer targeting antibody or antigen-binding portion thereof is masked. In some embodiments, the OKT3 scFv or OKT3-derived scFv includes a first antibody or antigen-binding fragment thereof (AB1) that binds CD3ε, where the AB1 is attached to a masking moiety (MM1) such that coupling of the MM1 reduces the ability of the AB1 to bind CD3ε. In some embodiments, the cancer targeting antibody or antigen-binding fragment thereof includes a second antibody or fragment thereof that includes a second antibody or antigen-binding fragment thereof (AB2) that binds a second, cancer-related target, where the AB2 is attached to a masking moiety (MM2) such that coupling of the MM2 reduces the ability of the AB2 to bind the second, cancer-related target. In some embodiments, the OKT3 scFv or OKT3-derived scFv includes a first antibody or antigen-binding fragment thereof (AB1) that binds CD3ε, where the AB1 is attached to a masking moiety (MM1) such that coupling of the MM1 reduces the ability of the AB1 to bind CD3ε, and the cancer targeting antibody or antigen-binding fragment thereof includes a second antibody or fragment thereof that includes a second antibody or antigen-binding fragment thereof (AB2) that binds a second, cancer-related target, where the AB2 is attached to a masking moiety (MM2) such that coupling of the MM2 reduces the ability of the AB2 to bind the second, cancer-related target.

[0158] In some embodiments, the T-cell engaging multispecific activatable antibody includes an OKT3 scFv or OKT3-derived scFv and a cancer targeting IgG antibody or antigen-binding fragment thereof, where at least one of the OKT3 scFv or OKT3-derived scFv and/or the cancer targeting IgG antibody or antigen-binding portion thereof is masked. In some embodiments, the OKT3 scFv or OKT3-derived scFv includes a first antibody or antigen-binding fragment thereof (AB1) that binds CD3ε, where the AB1 is attached to a masking moiety (MM1) such that coupling of the MM1 reduces the ability of the AB1 to bind CD3ε. In some embodiments, the cancer targeting IgG antibody or antigen-binding fragment thereof includes a second antibody or fragment thereof that includes a second antibody or antigen-binding fragment thereof (AB2) that binds a second, cancer-related target, where the AB2 is attached to a masking moiety (MM2) such that coupling of the MM2 reduces the ability of the AB2 to bind the second, cancer-related target. In some embodiments, the OKT3 scFv or OKT3-derived scFv includes a first antibody or antigen-binding fragment thereof (AB1) that binds CD3ε, where the AB1 is attached to a masking moiety (MM1) such that coupling of the MM1 reduces the ability of the AB1 to bind CD3ε, and the cancer targeting antibody IgG or antigen-binding fragment thereof includes a second antibody or fragment thereof that includes a second antibody or antigen-binding fragment thereof (AB2) that binds a second, cancer-related target, where the AB2 is attached to a masking moiety (MM2) such that coupling of the MM2 reduces the ability of the AB2 to bind the second, cancer-related target.

[0159] In some embodiments, the T-cell engaging multispecific activatable antibody includes an anti-CD3 epsilon (CD3ε) scFv that is derived from SP34, where at least one of the targeting antibody or antigen-binding fragment thereof and/or the SP34 scFv or SP34-derived scFv is masked. In some embodiments, the SP34 scFv or SP34-derived scFv includes a first antibody or antigen-binding fragment thereof (AB1) that binds CD3ε, where the AB1 is attached to a masking moiety (MM1) such that coupling of the MM1 reduces the ability of the AB1 to bind CD3ε. In some embodiments, the targeting antibody or antigen-binding fragment thereof includes a second antibody or fragment thereof that includes a second antibody or antigen-binding fragment thereof (AB2) that binds a second target, where the AB2 is attached to a masking moiety (MM2) such that coupling of the MM2 reduces the ability of the AB2 to bind the second target. In some embodiments, the SP34 scFv or SP34-derived scFv includes a first antibody or antigen-binding fragment thereof (AB1) that binds CD3ε, where the AB1 is attached to a masking moiety (MM1) such that coupling of the MM1 reduces the ability of the AB1 to bind CD3ε, and the targeting antibody or antigen-binding fragment thereof includes a second antibody or fragment thereof that includes a second antibody or antigen-binding fragment thereof (AB2) that binds a second target, where the AB2 is attached to a masking moiety (MM2) such that coupling of the MM2 reduces the ability of the AB2 to bind the second target.

[0160] In some embodiments, the T-cell engaging multispecific activatable antibody includes an SP34 scFv or SP34-derived scFv and a cancer targeting antibody or antigen-binding fragment thereof, where at least one of the SP34 scFv or SP34-derived scFv and/or the cancer targeting antibody or antigen-binding portion thereof is masked. In some embodiments, the SP34 scFv or SP34-derived scFv includes a first antibody or antigen-binding fragment thereof (AB1) that binds CD3ε, where the AB1 is attached to a masking moiety (MM1) such that coupling of the MM1 reduces the ability of the AB1 to bind CD3ε. In some embodiments, the cancer targeting antibody or antigen-binding fragment thereof includes a second antibody or fragment thereof that includes a second antibody or antigen-binding fragment thereof (AB2) that binds a second, cancer-related target, where the AB2 is attached to a masking moiety (MM2) such that coupling of the MM2 reduces the ability of the AB2 to bind the second, cancer-related target. In some embodiments, the SP34 scFv or SP34-derived scFv includes a first antibody or antigen-binding fragment thereof (AB1) that binds CD3ε, where the AB1 is attached to a masking moiety (MM1) such that coupling of the MM1 reduces the ability of the AB1 to bind CD3ε, and the cancer targeting antibody or antigen-binding fragment thereof includes a second antibody or fragment thereof that includes a second antibody or antigen-binding fragment thereof (AB2) that binds a second, cancer-related target, where the AB2 is attached to a masking moiety (MM2) such that coupling of the MM2 reduces the ability of the AB2 to bind the second, cancer-related target.

[0161] In some embodiments, the T-cell engaging multispecific activatable antibody includes an SP34 scFv or SP34-derived scFv and a cancer targeting IgG antibody or antigen-binding fragment thereof, where at least one of the SP34 scFv or SP34-derived scFv and/or the cancer targeting IgG antibody or antigen-binding portion thereof is masked. In some embodiments, the SP34 scFv or SP34-derived scFv includes a first antibody or antigen-binding fragment thereof (AB1) that binds CD3ε, where the AB1 is attached to a masking moiety (MM1) such that coupling of the MM1 reduces the ability of the AB1 to bind CD3ε. In some embodiments, the cancer targeting IgG antibody or antigen-binding fragment thereof includes a second antibody or fragment thereof that includes a second antibody or antigen-binding fragment thereof (AB2) that binds a second, cancer-related target, where the AB2 is attached to a masking moiety (MM2) such that coupling of the MM2 reduces the ability of the AB2 to bind the second, cancer-related target. In some embodiments, the SP34 scFv or SP34-derived scFv includes a first antibody or antigen-binding fragment thereof (AB1) that binds CD3ε, where the AB1 is attached to a masking moiety (MM1) such that coupling of the MM1 reduces the ability of the AB1 to bind CD3ε, and the cancer targeting antibody IgG or antigen-binding fragment thereof includes a second antibody or fragment thereof that includes a second antibody or antigen-binding fragment thereof (AB2) that binds a second, cancer-related target, where the AB2 is attached to a masking moiety (MM2) such that coupling of the MM2 reduces the ability of the AB2 to bind the second, cancer-related target.

[0162] In some embodiments, the T-cell engaging multispecific activatable antibody includes an anti-CD3 epsilon (CD3ε) scFv that includes the following complementarity determining region (CD3ε) sequences: a VH CDR1 sequence that includes at least the amino acid sequence TYAMN (SEQ ID NO: 53); a VH CD2 sequence that includes at least the amino acid sequence RIRSKYNNYATYYADSVKD (SEQ ID NO: 54); a VH CDR3 sequence that includes at least the amino acid sequence HGNFGNSYVSWFAY (SEQ ID NO: 55), a VL CDR1 sequence that includes at least the amino acid sequence RSSTGAVTTSNYAN (SEQ ID NO: 56); a VL CDR2 sequence that includes at least the amino acid sequence GTNKRAP (SEQ ID NO: 57); and a VL CDR3 sequence that includes at least the amino acid sequence ALWYSNLWV (SEQ ID NO: 58), where at least one of the targeting antibody or antigen-binding fragment thereof and/or the anti-CD3ε scFv is masked. In some embodiments, the anti-CD3ε scFv includes a first antibody or antigen-binding fragment thereof (AB1) having the CD3ε sequences set for the above, i.e., SEQ ID NOs: 53, 54, 55, 56, 57, and 58, where the AB1 is attached to a masking moiety (MM1) such that coupling of the MM1 reduces the ability of the AB1 to bind CD3ε. In some embodiments, the targeting antibody or antigen-binding fragment thereof includes a second antibody or fragment thereof that includes a second antibody or antigen-binding fragment thereof (AB2) that binds a second target, where the AB2 is attached to a masking moiety (MM2) such that coupling of the MM2 reduces the ability of the AB2 to bind the second target. In some embodiments, the anti-CD3ε scFv includes a first antibody or antigen-binding fragment thereof (AB1) that includes the CD3ε sequences of SEQ ID NOs: 53, 54, 55, 56, 57, and 58, where the AB1 is attached to a masking moiety (MM1) such that coupling of the MM1 reduces the ability of the AB1 to bind CD3ε, and the targeting antibody or antigen-binding fragment thereof includes a second antibody or fragment thereof that includes a second antibody or antigen-binding fragment thereof (AB2) that binds a second target, where the AB2 is attached to a masking moiety (MM2) such that coupling of the MM2 reduces the ability of the AB2 to bind the second target.

[0163] In some embodiments, the T-cell engaging multispecific activatable antibody includes an anti-CD3ε scFv that includes the CD3ε sequences of SEQ ID NOs: 53, 54, 55, 56, 57, and 58 and a cancer targeting antibody or antigen-binding fragment thereof, where at least one of the anti-CD3ε scFv and/or the cancer targeting antibody or antigen-binding portion thereof is masked. In some embodiments, the anti-CD3ε scFv includes a first antibody or antigen-binding fragment thereof (AB1) that includes the CD3ε sequences of SEQ ID NOs: 53, 54, 55, 56, 57, and 58, where the AB1 is attached to a masking moiety (MM1) such that coupling of the MM1 reduces the ability of the AB1 to bind CD3ε. In some embodiments, the cancer targeting antibody or antigen-binding fragment thereof includes a second antibody or fragment thereof that includes a second antibody or antigen-binding fragment thereof (AB2) that binds a second, cancer-related target, where the AB2 is attached to a masking moiety (MM2) such that coupling of the MM2 reduces the ability of the AB2 to bind the second, cancer-related target. In some embodiments, the anti-CD3ε scFv includes a first antibody or antigen-binding fragment thereof (AB1) that includes the CD3ε sequences of SEQ ID NOs: 53, 54, 55, 56, 57, and 58, where the AB1 is attached to a masking moiety (MM1) such that coupling of the MM1 reduces the ability of the AB1 to bind CD3ε, and the cancer targeting antibody or antigen-binding fragment thereof includes a second antibody or fragment thereof that includes a second antibody or antigen-binding fragment thereof (AB2) that binds a second, cancer-related target, where the AB2 is attached to a masking moiety (MM2) such that coupling of the MM2 reduces the ability of the AB2 to bind the second, cancer-related target.

[0164] In some embodiments, the T-cell engaging multispecific activatable antibody includes an anti-CD3εd scFv that includes the CD3ε sequences of SEQ ID NOs: 53, 54, 55, 56, 57, and 58 and a cancer targeting IgG antibody or antigen-binding fragment thereof, where at least one of the anti-CD3ε scFv and/or the cancer targeting IgG antibody or antigen-binding portion thereof is masked. In some embodiments, the anti-CD3ε scFv includes a first antibody or antigen-binding fragment thereof (AB1) that includes the CD3ε sequences of SEQ ID NOs: 53, 54, 55, 56, 57, and 58, where the AB1 is attached to a masking moiety (MM1) such that coupling of the MM1 reduces the ability of the AB1 to bind CD3ε. In some embodiments, the cancer targeting IgG antibody or antigen-binding fragment thereof includes a second antibody or fragment thereof that includes a second antibody or antigen-binding fragment thereof (AB2) that binds a second, cancer-related target, where the AB2 is attached to a masking moiety (MM2) such that coupling of the MM2 reduces the ability of the AB2 to bind the second, cancer-related target. In some embodiments, the anti-CD3ε scFv includes a first antibody or antigen-binding fragment thereof (AB1) that includes the CD3ε sequences of SEQ ID NOs: 53, 54, 55, 56, 57, and 58, where the AB1 is attached to a masking moiety (MM1) such that coupling of the MM1 reduces the ability of the AB1 to bind CD3ε, and the cancer targeting antibody IgG or antigen-binding fragment thereof includes a second antibody or fragment thereof that includes a second antibody or antigen-binding fragment thereof (AB2) that binds a second, cancer-related target, where the AB2 is attached to a masking moiety (MM2) such that coupling of the MM2 reduces the ability of the AB2 to bind the second, cancer-related target.

[0165] In some embodiments, the multi-antigen targeting antibodies and/or multi-antigen targeting activatable antibodies include at least a first antibody or antigen-binding fragment thereof that binds a first target and/or first epitope and a second antibody or antigen-binding fragment thereof that binds a second target and/or a second epitope, where at least one of the targets and/or epitopes is CD3ε. In some embodiments, the multi-antigen targeting antibodies and/or multi-antigen targeting activatable antibodies bind two or more different targets, where at least one target is CD3ε. In some embodiments, the multi-antigen targeting antibodies and/or multi-antigen targeting activatable antibodies bind two or more different epitopes on CD3ε. In some embodiments, the multi-antigen targeting antibodies and/or multi-antigen targeting activatable antibodies bind a combination of two or more different targets and two or more different epitopes on the same target, where at least one of the targets and/or epitopes is CD3ε.

[0166] Various embodiments of multispecific activatable antibodies of the disclosure are shown in FIGS. 5A-5D, 6A-6F, 7A-7J, 8A-8J, 9A-9J, 10A-10J, 11A-11J, and 12A-12D. In some embodiments, a multispecific activatable antibody comprising an IgG has the IgG variable domains masked. In some embodiments, a multispecific activatable antibody comprising a scFv has the scFv domains masked. In some embodiments, a multispecific activatable antibody has both IgG variable domains and scFv domains, where at least one of the IgG variable domains is coupled to a masking moiety. In some embodiments, a multispecific activatable antibody has both IgG variable domains and scFv domains, where at least one of the scFv domains is coupled to a masking moiety. In some embodiments, a multispecific activatable antibody has both IgG variable domains and scFv domains, where at least one of the IgG variable domains is coupled to a masking moiety and at least one of the scFv domains is coupled to a masking moiety. In some embodiments, a multispecific activatable antibody has both IgG variable domains and scFv domains, where each of the IgG variable domains and the scFv domains is coupled to its own masking moiety. In some embodiments, one antibody domain of a multispecific activatable antibody has specificity for a target antigen and another antibody domain has specificity for a T-cell surface antigen. In some embodiments, one antibody domain of a multispecific activatable antibody has specificity for a target antigen and another antibody domain has specificity for another target antigen. In some embodiments, one antibody domain of a multispecific activatable antibody has specificity for an epitope of a target antigen and another antibody domain has specificity for another epitope of the target antigen.

[0167] In a multispecific activatable antibody, a scFv can be fused to the carboxyl terminus of the heavy chain of an IgG activatable antibody, to the carboxyl terminus of the light chain of an IgG activatable antibody, or to the carboxyl termini of both the heavy and light chains of an IgG activatable antibody. In a multispecific activatable antibody, a scFv can be fused to the amino terminus of the heavy chain of an IgG activatable antibody, to the amino terminus of the light chain of an IgG activatable antibody, or to the amino termini of both the heavy and light chains of an IgG activatable antibody. In a multispecific activatable antibody, a scFv can be fused to any combination of one or more carboxyl termini and one or more amino termini of an IgG activatable antibody. In some embodiments, a masking moiety (MM) linked to a cleavable moiety (CM) is attached to and masks an antigen binding domain of the IgG. In some embodiments, a masking moiety (MM) linked to a cleavable moiety (CM) is attached to and masks an antigen binding domain of at least one scFv. In some embodiments, a masking moiety (MM) linked to a cleavable moiety (CM) is attached to and masks an antigen binding domain of an IgG and a masking moiety (MM) linked to a cleavable moiety (CM) is attached to and masks an antigen binding domain of at least one scFv.

[0168] In some embodiments, a single chain variable domain, specific for binding CD3ε is fused to the carboxyl terminus of a fully human IgG1 antibody (targeting antibody) that binds to a cell surface antigen. Fusion of the scFv can be to the carboxyl terminus of the heavy chain, to the carboxyl terminus of the light chain or to both chains. In some embodiments, a single chain variable domain, specific for binding CD3ε is fused to the amino terminus of a fully human IgG1 antibody (targeting antibody) that binds to a cell surface antigen. Fusion of the scFv can be to the amino terminus of the heavy chain, to the amino terminus of the light chain or to both chains. The fusions are constructed as a single genetic construct and expressed in cells in culture. The targeting antibody can be specific for binding to one or more tumor surface antigens, or any cell targeted for depletion. The scFv can be specific for the same or different antigens.

[0169] Other examples of multispecific activatable antibody structures include, but are not limited to, the following: (VL-CL)₂:(VH-CH1-CH2-CH3-L4-VH*-L3-VL*-L2-CM-L1-MM)₂; (VL-CL)₂:(VH-CH1-CH2-CH3-L4-VL*-L3-VH*-L2-CM-L1-MM)₂; (MM-L1-CM-L2-VL-CL)₂:(VH-CH1-CH2-CH3-L4-VH*-L3-VL*)₂; (MM-L1-CM-L2-VL-CL)₂:(VH-CH1-CH2-CH3-L4-VL*-L3-VH*)₂; (VL-CL)₂:(MM-L1-CM-L2-VL*-L3-VH*-L4-VH-CH1-CH2-CH3)₂; (VL-CL)₂:(MM-L1-CM-L2-VH*-L3-VL*-L4-VH-CH1-CH2-CH3)₂; (MM-L1-CM-L2-VL-CL)₂:(VL*-L3-VH*-L4-VH-CH1-CH2-CH3)₂; (MM-L1-CM-L2-VL-CL)₂:(VH*-L3-VL*-L4-VH-CH1-CH2-CH3)₂; (VL-CL-L4-VH*-L3-VL*-L2-CM-L1-MM)₂:(VH-CH1-CH2-CH3)₂; (VL-CL-L4-VL*-L3-VH*-L2-CM-L1-MM)₂:(VH-CH1-CH2-CH3)₂; (MM-L1-CM-L2-VL*-L3-VH*-L4-VL-CL)₂:(VH-CH1-CH2-CH3)₂; (MM-L1-CM-L2-VH*-L3-VL*-L4-VL-CL)₂:(VH-CH1-CH2-CH3)₂; (VL-CL-L4-VH*-L3-VL*-L2-CM-L1-MM)₂: (MM-L1-CM-L2-VL*-L3-VH*-L4-VH-CH1-CH2-CH3)₂; (VL-CL-L4-VH*-L3-VL*-L2-CM-L1-MM)₂: (MM-L1-CM-L2-VH*-L3-VL*-L4-VH-CH1-CH2-CH3)₂; (VL-CL-L4-VL*-L3-VH*-L2-CM-L1-MM)₂: (MM-L1-CM-L2-VL*-L3-VH*-L4-VH-CH1-CH2-CH3)₂; (VL-CL-L4-VL*-L3-VH*-L2-CM-L1-MM)₂: (MM-L1-CM-L2-VH*-L3-VL*-L4-VH-CH1-CH2-CH3)₂; (VL-CL-L4-VH*-L3-VL*)₂: (MM-L1-CM-L2-VL*-L3-VH*-L4-VH-CH1-CH2-CH3)₂; (VL-CL-L4-VH*-L3-VL*)₂: (MM-L1-CM-L2-VH*-L3-VL*-L4-VH-CH1-CH2-CH3)₂; (VL-CL-L4-VL*-L3-VH*)₂: (MM-L1-CM-L2-VL*-L3-VH*-L4-VH-CH1-CH2-CH3)₂; (VL-CL-L4-VL*-L3-VH*)₂: (MM-L1-CM-L2-VH*-L3-VL*-L4-VH-CH1-CH2-CH3)2; (VL-CL-L4-VH*-L3-VL*-L2-CM-L1-MM)₂: (VL*-L3-VH*-L4-VH-CH1-CH2-CH3)₂; (VL-CL-L4-VH*-L3-VL*-L2-CM-L1-MM)₂: (VH*-L3-VL*-L4-VH-CH1-CH2-CH3)₂; (VL-CL-L4-VL*-L3-VH*-L2-CM-L1-MM)₂: (VL*-L3-VH*-L4-VH-CH1-CH2-CH3)₂; or (VL-CL-L4-VL*-L3-VH*-L2-CM-L1-MM)₂: (VH*-L3-VL*-L4-VH-CH1-CH2-CH3)₂, wherein: VL and VH represent the light and heavy variable domains of the first specificity, contained in the IgG; VL* and VH* represent the variable domains of the second specificity, contained in the scFv; L1 is a linker peptide connecting the masking moiety (MM) and the cleavable moiety (CM); L2 is a linker peptide connecting the cleavable moiety (CM), and the antibody; L3 is a linker peptide connecting the variable domains of the scFv; L4 is a linker peptide connecting the antibody of the first specificity to the antibody of the second specificity; CL is the light-chain constant domain; and CH1, CH2, CH3 are the heavy chain constant domains. The first and second specificities may be toward any antigen or epitope.

[0170] In some embodiments of a T-cell engaging multispecific activatable antibody, one antigen is typically CD3ε and the other is an antigen present on the surface of a tumor cell or other cell type associated with disease, such as, but not limited to, any target listed in Table 1, such as, but not limited to, EGFR, erbB2, EpCAM, Jagged, PD-L1, B7H3, or CD71 (transferrin receptor).

[0171] In some embodiments, the targeting antibody includes an anti-EGFR antibody. In some embodiments, the targeting antibody includes C225v5, which is specific for binding to EGFR. In some embodiments, the targeting antibody includes C225, which is specific for binding to EGFR. In some embodiments, the targeting antibody includes C225v4, which is specific for binding to EGFR. In some embodiments, the targeting antibody includes C225v6, which is specific for binding to EGFR. In some embodiments, the targeting antibody includes an anti-Jagged antibody. In some embodiments, the targeting antibody includes 4D11, which is specific for binding to human and mouse Jagged 1 and Jagged 2. In some embodiments, the targeting antibody includes 4D11v2, which is specific for binding to human and mouse Jagged 1 and Jagged 2.

[0172] In some embodiments, the targeting antibody can be in the form an activatable antibody. In some embodiments, the scFv(s) can be in the form of a Pro-scFv (see, e.g., WO 2009/025846, WO 2010/081173).

[0173] In some embodiments, the multispecific antibodies and/or multispecific activatable antibodies provided herein include at least a first antibody or antigen binding fragment thereof (AB1) that specifically binds CD3ε and that contains a combination of a VH CDR1 sequence, a VH CDR2 sequence, and a VH CDR3 sequence, wherein at least one of the VH CDR1 sequence, the VH CDR2 sequence, and the VH CDR3 sequence is selected from a VH CDR1 sequence that includes at least the amino acid sequence TYAMN (SEQ ID NO: 53); a VH CD2 sequence that includes at least the amino acid sequence RIRSKYNNYATYYADSVKD (SEQ ID NO: 54); a VH CDR3 sequence that includes at least the amino acid sequence HGNFGNSYVSWFAY (SEQ ID NO: 55), and combinations thereof.

[0174] In some embodiments, the multispecific antibodies and/or multispecific activatable antibodies provided herein include at least a first antibody or antigen binding fragment thereof (AB1) that specifically binds CD3ε and that contains a combination of a VL CDR1 sequence, a VL CDR2 sequence, and a VL CDR3 sequence, wherein at least one of the VL CDR1 sequence, the VL CDR2 sequence, and the VL CDR3 sequence is selected from a VL CDR1 sequence that includes at least the amino acid sequence RSSTGAVTTSNYAN (SEQ ID NO: 56); a VL CDR2 sequence that includes at least the amino acid sequence GTNKRAP (SEQ ID NO: 57); and a VL CDR3 sequence that includes at least the amino acid sequence ALWYSNLWV (SEQ ID NO: 58), and combinations thereof.

[0175] In some embodiments, the multispecific antibodies and/or multispecific activatable antibodies provided herein include at least a first antibody or antigen binding fragment thereof (AB1) that specifically binds CD3ε and that contains a VH CDR1 sequence that includes at least the amino acid sequence TYAMN (SEQ ID NO: 53); a VH CD2 sequence that includes at least the amino acid sequence RIRSKYNNYATYYADSVKD (SEQ ID NO: 54); a VH CDR3 sequence that includes at least the amino acid sequence HGNFGNSYVSWFAY (SEQ ID NO: 55), a VL CDR1 sequence that includes at least the amino acid sequence RSSTGAVTTSNYAN (SEQ ID NO: 56); a VL CDR2 sequence that includes at least the amino acid sequence GTNKRAP (SEQ ID NO: 57); and a VL CDR3 sequence that includes at least the amino acid sequence ALWYSNLWV (SEQ ID NO: 58).

[0176] In some embodiments, the multispecific antibodies and/or multispecific activatable antibodies provided herein include at least a first antibody or antigen binding fragment thereof (AB1) that specifically binds CD3ε and that contains a VH CDR1 sequence that is at least 90%, 91%, 92%, 93%, 94%, 95%, 96%, 97%, 98%, 99% or more identical to the amino acid sequence TYAMN (SEQ ID NO: 53); a VH CD2 sequence that is at least 90%, 91%, 92%, 93%, 94%, 95%, 96%, 97%, 98%, 99% or more identical to the amino acid sequence RIRSKYNNYATYYADSVKD (SEQ ID NO: 54); a VH CDR3 sequence that is at least 90%, 91%, 92%, 93%, 94%, 95%, 96%, 97%, 98%, 99% or more identical to the amino acid sequence HGNFGNSYVSWFAY (SEQ ID NO: 55), a VL CDR1 sequence that is at least 90%, 91%, 92%, 93%, 94%, 95%, 96%, 97%, 98%, 99% or more identical to the amino acid sequence RSSTGAVTTSNYAN (SEQ ID NO: 56); a VL CDR2 sequence that is at least 90%, 91%, 92%, 93%, 94%, 95%, 96%, 97%, 98%, 99% or more identical to the amino acid sequence GTNKRAP (SEQ ID NO: 57); and a VL CDR3 sequence that is at least 90%, 91%, 92%, 93%, 94%, 95%, 96%, 97%, 98%, 99% or more identical to the amino acid sequence ALWYSNLWV (SEQ ID NO: 58).

[0177] In some embodiments, the multispecific antibodies and/or multispecific activatable antibodies provided herein include at least a first antibody or antigen binding fragment thereof (AB1) that specifically binds a Jagged target, e.g., Jagged 1 and/or Jagged 2, and that contains a combination of a VH CDR1 sequence, a VH CDR2 sequence, and a VH CDR3 sequence, wherein at least one of the VH CDR1 sequence, the VH CDR2 sequence, and the VH CDR3 sequence is selected from a VH CDR1 sequence that includes at least the amino acid sequence SYAMS (SEQ ID NO: 88); a VH CD2 sequence that includes at least the amino acid sequence SIDPEGRQTYYADSVKG (SEQ ID NO: 89); and a VH CDR3 sequence that includes at least the amino acid sequence DIGGRSAFDY (SEQ ID NO: 90), and combinations thereof.

[0178] In some embodiments, the multispecific antibodies and/or multispecific activatable antibodies provided herein include at least a first antibody or antigen binding fragment thereof (AB1) that specifically binds a Jagged target, e.g., Jagged 1 and/or Jagged 2, and that contains a combination of a VL CDR1 sequence, a VL CDR2 sequence, and a VL CDR3 sequence, wherein at least one of the VL CDR1 sequence, the VL CDR2 sequence, and the VL CDR3 sequence is selected from a VL CDR1 sequence that includes at least the amino acid sequence RASQSISSY (SEQ ID NO: 91); a VL CDR2 sequence that includes at least the amino acid sequence AASSLQS (SEQ ID NO: 92); and a VL CDR3 sequence that includes at least the amino acid sequence QQTVVAPPL (SEQ ID NO: 93), and combinations thereof.

[0179] In some embodiments, the multispecific antibodies and/or multispecific activatable antibodies provided herein include at least a first antibody or antigen binding fragment thereof (AB1) that specifically binds a Jagged target, e.g., Jagged 1 and/or Jagged 2, and that contains a combination of a VH CDR1 sequence, a VH CDR2 sequence, and a VH CDR3 sequence, wherein at least one of the VH CDR1 sequence, the VH CDR2 sequence, and the VH CDR3 sequence is selected from a VH CDR1 sequence that includes a sequence that is at least 90%, 91%, 92%, 93%, 94%, 95%, 96%, 97%, 98%, 99% or more identical to the amino acid sequence SYAMS (SEQ ID NO: 88); a VH CD2 sequence that includes a sequence that is at least 90%, 91%, 92%, 93%, 94%, 95%, 96%, 97%, 98%, 99% or more identical to the amino acid sequence SIDPEGRQTYYADSVKG (SEQ ID NO: 89); and a VH CDR3 sequence that includes a sequence that is at least 90%, 91%, 92%, 93%, 94%, 95%, 96%, 97%, 98%, 99% or more identical to the amino acid sequence DIGGRSAFDY (SEQ ID NO: 90), and combinations thereof.

[0180] In some embodiments, the multispecific antibodies and/or multispecific activatable antibodies provided herein include at least a first antibody or antigen binding fragment thereof (AB1) that specifically binds a Jagged target, e.g., Jagged 1 and/or Jagged 2, and that contains a combination of a VL CDR1 sequence, a VL CDR2 sequence, and a VL CDR3 sequence, wherein at least one of the VL CDR1 sequence, the VL CDR2 sequence, and the VL CDR3 sequence is selected from a VL CDR1 sequence that includes a sequence that is at least 90%, 91%, 92%, 93%, 94%, 95%, 96%, 97%, 98%, 99% or more identical to the amino acid sequence RASQSISSY (SEQ ID NO: 91); a VL CDR2 sequence that includes a sequence that is at least 90%, 91%, 92%, 93%, 94%, 95%, 96%, 97%, 98%, 99% or more identical to the amino acid sequence AASSLQS (SEQ ID NO: 92); and a VL CDR3 sequence that includes a sequence that is at least 90%, 91%, 92%, 93%, 94%, 95%, 96%, 97%, 98%, 99% or more identical to the amino acid sequence QQTVVAPPL (SEQ ID NO: 93), and combinations thereof.

[0181] In some embodiments, the multispecific antibodies and/or multispecific activatable antibodies provided herein include at least a first antibody or antigen binding fragment thereof (AB1) that specifically binds a Jagged target, e.g., Jagged 1 and/or Jagged 2, and that contains a combination of a VH CDR1 sequence, a VH CDR2 sequence, a VH CDR3 sequence, a VL CDR1 sequence, a VL CDR2 sequence, and a VL CDR3 sequence, wherein the VH CDR1 sequence includes at least the amino acid sequence SYAMS (SEQ ID NO: 88); the VH CD2 sequence includes at least the amino acid sequence SIDPEGRQTYYADSVKG (SEQ ID NO: 89); the VH CDR3 sequence includes at least the amino acid sequence DIGGRSAFDY (SEQ ID NO: 90); the VL CDR1 sequence includes at least the amino acid sequence RASQSISSY (SEQ ID NO: 91); the VL CDR2 sequence includes at least the amino acid sequence AASSLQS (SEQ ID NO: 92); and the VL CDR3 sequence includes at least the amino acid sequence QQTVVAPPL (SEQ ID NO: 93).

[0182] In some embodiments, the multispecific antibodies and/or multispecific activatable antibodies provided herein include at least a first antibody or antigen binding fragment thereof (AB1) that specifically binds a Jagged target, e.g., Jagged 1 and/or Jagged 2, and that contains a combination of a VH CDR1 sequence, a VH CDR2 sequence, a VH CDR3 sequence, a VL CDR1 sequence, a VL CDR2 sequence, and a VL CDR3 sequence, wherein the VH CDR1 sequence includes a sequence that is at least 90%, 91%, 92%, 93%, 94%, 95%, 96%, 97%, 98%, 99% or more identical to the amino acid sequence SYAMS (SEQ ID NO: 88); the VH CD2 sequence includes a sequence that is at least 90%, 91%, 92%, 93%, 94%, 95%, 96%, 97%, 98%, 99% or more identical to the amino acid sequence SIDPEGRQTYYADSVKG (SEQ ID NO: 89); the VH CDR3 sequence includes a sequence that is at least 90%, 91%, 92%, 93%, 94%, 95%, 96%, 97%, 98%, 99% or more identical to the amino acid sequence DIGGRSAFDY (SEQ ID NO: 90); the VL CDR1 sequence includes a sequence that is at least 90%, 91%, 92%, 93%, 94%, 95%, 96%, 97%, 98%, 99% or more identical to the amino acid sequence RASQSISSY (SEQ ID NO: 91); the VL CDR2 sequence includes a sequence that is at least 90%, 91%, 92%, 93%, 94%, 95%, 96%, 97%, 98%, 99% or more identical to the amino acid sequence AASSLQS (SEQ ID NO: 92); and the VL CDR3 sequence includes a sequence that is at least 90%, 91%, 92%, 93%, 94%, 95%, 96%, 97%, 98%, 99% or more identical to the amino acid sequence QQTVVAPPL (SEQ ID NO: 93).

[0183] In some embodiments, the multispecific antibodies and/or multispecific activatable antibodies provided herein include at least a first antibody or antigen binding fragment thereof (AB1) that specifically binds Epidermal Growth Factor Receptor (EGFR) and that contains a combination of a VH CDR1 sequence, a VH CDR2 sequence, and a VH CDR3 sequence, wherein at least one of the VH CDR1 sequence, the VH CDR2 sequence, and the VH CDR3 sequence is selected from a VH CDR1 sequence that includes at least the amino acid sequence NYGVH (SEQ ID NO: 94); a VH CD2 sequence that includes at least the amino acid sequence VIWSGGNTDYNTPFTS (SEQ ID NO: 95); a VH CDR3 sequence that includes at least the amino acid sequence ALTYYDYEFAY (SEQ ID NO: 96); and combinations thereof.

[0184] In some embodiments, the multispecific antibodies and/or multispecific activatable antibodies provided herein include at least a first antibody or antigen binding fragment thereof (AB1) that specifically binds EGFR and that contains a combination of a VL CDR1 sequence, a VL CDR2 sequence, and a VL CDR3 sequence, wherein at least one of the VL CDR1 sequence, the VL CDR2 sequence, and the VL CDR3 sequence is selected from a VL CDR1 sequence that includes at least the amino acid sequence RASQSIGTNIH (SEQ ID NO: 97); a VL CDR2 sequence that includes at least the amino acid sequence KYASESIS (SEQ ID NO: 98); and a VL CDR3 sequence that includes at least the amino acid sequence QQNNNWPTT (SEQ ID NO: 99), and combinations thereof.

[0185] In some embodiments, the multispecific antibodies and/or multispecific activatable antibodies provided herein include at least a first antibody or antigen binding fragment thereof (AB1) that specifically binds EGFR and that contains a combination of a VH CDR1 sequence, a VH CDR2 sequence, and a VH CDR3 sequence, wherein at least one of the VH CDR1 sequence, the VH CDR2 sequence, and the VH CDR3 sequence is selected from a VH CDR1 sequence that includes a sequence that is at least 90%, 91%, 92%, 93%, 94%, 95%, 96%, 97%, 98%, 99% or more identical to the amino acid sequence NYGVH (SEQ ID NO: 94); a VH CD2 sequence that includes a sequence that is at least 90%, 91%, 92%, 93%, 94%, 95%, 96%, 97%, 98%, 99% or more identical to the amino acid sequence VIWSGGNTDYNTPFTS (SEQ ID NO: 95); a VH CDR3 sequence that includes a sequence that is at least 90%, 91%, 92%, 93%, 94%, 95%, 96%, 97%, 98%, 99% or more identical to the amino acid sequence ALTYYDYEFAY (SEQ ID NO: 96); and combinations thereof.

[0186] In some embodiments, the multispecific antibodies and/or multispecific activatable antibodies provided herein include at least a first antibody or antigen binding fragment thereof (AB1) that specifically binds EGFR and that contains a combination of a VL CDR1 sequence, a VL CDR2 sequence, and a VL CDR3 sequence, wherein at least one of the VL CDR1 sequence, the VL CDR2 sequence, and the VL CDR3 sequence is selected from a VL CDR1 sequence that includes a sequence that is at least 90%, 91%, 92%, 93%, 94%, 95%, 96%, 97%, 98%, 99% or more identical to the amino acid sequence RASQSIGTNIH (SEQ ID NO: 97); a VL CDR2 sequence that includes a sequence that is at least 90%, 91%, 92%, 93%, 94%, 95%, 96%, 97%, 98%, 99% or more identical to the amino acid sequence KYASESIS (SEQ ID NO: 98); and a VL CDR3 sequence that includes a sequence that is at least 90%, 91%, 92%, 93%, 94%, 95%, 96%, 97%, 98%, 99% or more identical to the amino acid sequence QQNNNWPTT (SEQ ID NO: 99), and combinations thereof.

[0187] In some embodiments, the multispecific antibodies and/or multispecific activatable antibodies provided herein include at least a first antibody or antigen binding fragment thereof (AB1) that specifically binds EGFR and that contains a combination of a VH CDR1 sequence, a VH CDR2 sequence, a VH CDR3 sequence, a VL CDR1 sequence, a VL CDR2 sequence, and a VL CDR3 sequence, wherein the VH CDR1 sequence includes at least the amino acid sequence NYGVH (SEQ ID NO: 94); the VH CD2 sequence includes at least the amino acid sequence VIWSGGNTDYNTPFTS (SEQ ID NO: 95); the VH CDR3 sequence includes at least the amino acid sequence ALTYYDYEFAY (SEQ ID NO: 96); the VL CDR1 sequence includes at least the amino acid sequence RASQSIGTNIH (SEQ ID NO: 97); the VL CDR2 sequence includes at least the amino acid sequence KYASESIS (SEQ ID NO: 98); and the VL CDR3 sequence includes at least the amino acid sequence QQNNNWPTT (SEQ ID NO: 99).

[0188] In some embodiments, the multispecific antibodies and/or multispecific activatable antibodies provided herein include at least a first antibody or antigen binding fragment thereof (AB1) that specifically binds EGFR and that contains a combination of a VH CDR1 sequence, a VH CDR2 sequence, a VH CDR3 sequence, a VL CDR1 sequence, a VL CDR2 sequence, and a VL CDR3 sequence, wherein the VH CDR1 sequence includes a sequence that is at least 90%, 91%, 92%, 93%, 94%, 95%, 96%, 97%, 98%, 99% or more identical to the amino acid sequence NYGVH (SEQ ID NO: 94); the VH CD2 sequence includes a sequence that is at least 90%, 91%, 92%, 93%, 94%, 95%, 96%, 97%, 98%, 99% or more identical to the amino acid sequence VIWSGGNTDYNTPFTS (SEQ ID NO: 95); the VH CDR3 sequence includes a sequence that is at least 90%, 91%, 92%, 93%, 94%, 95%, 96%, 97%, 98%, 99% or more identical to the amino acid sequence ALTYYDYEFAY (SEQ ID NO: 96); the VL CDR1 sequence includes a sequence that is at least 90%, 91%, 92%, 93%, 94%, 95%, 96%, 97%, 98%, 99% or more identical to the amino acid sequence RASQSIGTNIH (SEQ ID NO: 97); the VL CDR2 sequence includes a sequence that is at least 90%, 91%, 92%, 93%, 94%, 95%, 96%, 97%, 98%, 99% or more identical to the amino acid sequence KYASESIS (SEQ ID NO: 98); and the VL CDR3 sequence includes a sequence that is at least 90%, 91%, 92%, 93%, 94%, 95%, 96%, 97%, 98%, 99% or more identical to the amino acid sequence QQNNNWPTT (SEQ ID NO: 99).

[0189] In some embodiments, the multispecific antibodies and/or multispecific activatable antibodies provided herein include at least a heavy chain amino acid sequence selected from the group consisting of those sequences shown in the Examples provided herein. In some embodiments, the multispecific antibodies and/or multispecific activatable antibodies provided herein include at least a light chain amino acid sequence selected from the group consisting of those sequences shown in the Examples provided herein. In some embodiments, the multispecific antibodies and/or multispecific activatable antibodies provided herein include at least a heavy chain amino acid sequence selected from the group consisting of those sequences shown in the Examples provided herein, and a light chain amino acid sequence selected from the group consisting of those sequences shown in the Examples provided herein.

[0190] In some embodiments, the multispecific antibodies and/or multispecific activatable antibodies provided herein include at least a heavy chain amino acid sequence that is at least 90%, 91%, 92%, 93%, 94%, 95%, 96%, 97%, 98%, 99% or more identical to an amino acid sequence selected from the group consisting of those sequences shown in the Examples provided herein. In some embodiments, the multispecific antibodies and/or multispecific activatable antibodies provided herein include at least a light chain amino acid sequence that is at least 90%, 91%, 92%, 93%, 94%, 95%, 96%, 97%, 98%, 99% or more identical to an amino acid sequence selected from the group consisting of those sequences shown in the Examples provided herein. In some embodiments, the multispecific antibodies and/or multispecific activatable antibodies provided herein include at least a heavy chain amino acid sequence that is at least 90%, 91%, 92%, 93%, 94%, 95%, 96%, 97%, 98%, 99% or more identical to an amino acid sequence selected from the group consisting of those sequences shown in the Examples provided herein, and a light chain amino acid sequence that is at least 90%, 91%, 92%, 93%, 94%, 95%, 96%, 97%, 98%, 99% or more identical to an amino acid sequence selected from the group consisting of those sequences shown in the Examples provided herein.

[0191] In some embodiments, the multispecific antibody and/or multispecific activatable antibody also includes an agent conjugated to the AB. In some embodiments, the agent is a therapeutic agent. In some embodiments, the agent is a detectable moiety. In some embodiments, the detectable moiety is a diagnostic agent. In some embodiments, the agent is conjugated to the multispecific via a linker. In some embodiments, the linker is a cleavable linker. In some embodiments, the linker is a non-cleavable linker.

[0192] In some embodiments, the multispecific antibody and/or multispecific activatable antibody also includes a detectable moiety. In some embodiments, the detectable moiety is a diagnostic agent.

[0193] In some embodiments, the multispecific antibody and/or multispecific activatable antibody naturally contains one or more disulfide bonds. In some embodiments, the multispecific antibody and/or multispecific activatable antibody can be engineered to include one or more disulfide bonds.

[0194] The disclosure also provides an isolated nucleic acid molecule encoding at least a portion of a multispecific antibody and/or multispecific activatable antibody described herein, such as for example, at least a first nucleic acid encoding at least a portion of the heavy chain of the multispecific antibody and/or multispecific activatable antibody and a second nucleic acid encoding at least a portion of the light chain of the multispecific antibody and/or multispecific activatable antibody, as well as vectors that include these isolated nucleic acid sequences. The disclosure provides methods of producing a multispecific antibody by culturing a cell under conditions that lead to expression of the antibody, wherein the cell comprises such a nucleic acid molecule(s). In some embodiments, the cell comprises such a vector.

[0195] The disclosure also provides multispecific activatable antibodies and/or multispecific activatable antibody compositions that include at least a first antibody or antigen-binding fragment thereof (AB1) that specifically binds a first target or first epitope and a second antibody or antigen-biding fragment thereof (AB2) that binds a second target or a second epitope, where at least AB1 is coupled or otherwise attached to a masking moiety (MM1), such that coupling of the MM1 reduces the ability of AB1 to bind its target. In some embodiments, the MM1 is coupled to AB1 via a first cleavable moiety (CM1) sequence that includes a substrate for a protease, for example, a protease that is produced by a tumor that is in proximity to cells that express the target and/or produced by a tumor that is co-localized with the target of AB1 at a treatment site or a diagnostic site in a subject. The multispecific activatable antibodies provided herein are stable in circulation, activated at intended sites of therapy and/or diagnosis but not in normal, i.e., healthy tissue, and, when activated, exhibit binding to the target of AB1 that is at least comparable to the corresponding, unmodified multispecific antibody.

[0196] In some embodiments, the multispecific activatable antibody comprises a linking peptide between the MM1 and the CM1.

[0197] In some embodiments, the multispecific activatable antibody comprises a linking peptide between the CM1 and the AB1.

[0198] In some embodiments, the activatable antibody comprises a first linking peptide (LP1) and a second linking peptide (LP2), and at least a portion of the multispecific activatable antibody in the uncleaved state has the structural arrangement from N-terminus to C-terminus as follows: MM1-LP1-CM1-LP2-AB1 or AB1-LP2-CM1-LP1-MM1. In some embodiments, the two linking peptides need not be identical to each other.

[0199] In some embodiments, at least one of LP1 or LP2 includes an amino acid sequence selected from the group consisting of (GS)ₙ, (GGS)ₙ, (GSGGS)ₙ (SEQ ID NO: 59) and (GGGS)ₙ (SEQ ID NO: 60), where n is an integer of at least one. In some embodiments, at least one of LP1 or LP2 includes an amino acid sequence selected from the group consisting of GGSG (SEQ ID NO: 61), GGSGG (SEQ ID NO: 62), GSGSG (SEQ ID NO: 63), GSGGG (SEQ ID NO: 64), GGGSG (SEQ ID NO: 65), and GSSSG (SEQ ID NO: 66).

[0200] In some embodiments, the multispecific activatable antibody includes at least a first antibody or antigen-binding fragment thereof (AB1) that specifically binds a first target or first epitope and a second antibody or antigen-binding fragment thereof (AB2) that specifically binds a second target or second epitope. In some embodiments, each of the AB in the multispecific activatable antibody is independently selected from the group consisting of a monoclonal antibody, domain antibody, single chain, Fab fragment, a F(ab′)₂ fragment, a scFv, a scAb, a dAb, a single domain heavy chain antibody, and a single domain light chain antibody. In some embodiments, each of the AB in the multispecific activatable antibody is a rodent (e.g., mouse or rat), chimeric, humanized or fully human monoclonal antibody.

[0201] In some embodiments, each of the AB in the multispecific activatable antibody has a dissociation constant of about 100 nM or less for binding to its corresponding target or epitope.

[0202] In some embodiments, the MM1 has a dissociation constant, i.e., dissociation constant at an equilibrium state, K_{d} for binding to the AB that is greater than the K_{d} for binding of the AB to its corresponding target or epitope.

[0203] In some embodiments, the MM1 has a K_{d} for binding to the AB that is no more than the K_{d} for binding of the AB to its corresponding target or epitope.

[0204] In some embodiments, the MM1 has a K_{d} for binding to the AB that is no less than the K_{d} for binding of the AB to its corresponding target or epitope.

[0205] In some embodiments, the MM1 has a K_{d} for binding to the AB that is approximately equal to the K_{d} for binding of the AB to its corresponding target or epitope.

[0206] In some embodiments, the MM1 has a K_{d} for binding to the AB that is less than the K_{d} for binding of the AB to its corresponding target or epitope.

[0207] In some embodiments, the MM1 has a K_{d} for binding to the AB that is no more than 2, 3, 4, 5, 10, 25, 50, 100, 250, 500, or 1,000 fold greater than the K_{d} for binding of the AB to its corresponding target or epitope. In some embodiments, the MM1 has a K_{d} for binding to the AB that is between 1-5, 2-5, 2-10, 5-10, 5-20, 5-50, 5-100, 10-100, 10-1,000, 20-100, 20-1000, or 100-1,000 fold greater than the K_{d} for binding of the AB to its corresponding target or epitope.

[0208] In some embodiments, the MM1 has an affinity for binding to the AB that is less than the affinity of binding of the AB to its corresponding target or epitope.

[0209] In some embodiments, the MM1 has an affinity for binding to the AB that is no more than the affinity of binding of the AB to its corresponding target or epitope.

[0210] In some embodiments, the MM1 has an affinity for binding to the AB that is approximately equal of the affinity of binding of the AB to its corresponding target or epitope.

[0211] In some embodiments, the MM1 has an affinity for binding to the AB that is no less than the affinity of binding of the AB to its corresponding target or epitope.

[0212] In some embodiments, the MM1 has an affinity for binding to the AB that is greater than the affinity of binding of the AB to its corresponding target or epitope.

[0213] In some embodiments, the MM1 has an affinity for binding to the AB that is 2, 3, 4, 5, 10, 25, 50, 100, 250, 500, or 1,000 less than the affinity of binding of the AB to its corresponding target or epitope. In some embodiments, the MM1 has an affinity for binding to the AB that is between 1-5, 2-5, 2-10, 5-10, 5-20, 5-50, 5-100, 10-100, 10-1,000, 20-100, 20-1000, or 100-1,000 fold less than the affinity of binding of the AB to its corresponding target or epitope. In some embodiments, the MM1 has an affinity for binding to the AB that is 2 to 20 fold less than the affinity of binding of the AB to its corresponding target or epitope. In some embodiments, a MM not covalently linked to the AB and at equimolar concentration to the AB does not inhibit the binding of the AB to its corresponding target or epitope.

[0214] In some embodiments, MM1 does not interfere or compete with its corresponding AB for binding to the corresponding target or epitope when the multispecific activatable antibody is in a cleaved state.

[0215] In some embodiments, MM1 is a polypeptide of about 2 to 40 amino acids in length. In some embodiments, each of the MM in the multispecific activatable antibody is a polypeptide of no more than 40 amino acids in length.

[0216] In some embodiments, MM1 has a polypeptide sequence that is different from that of target of the corresponding AB.

[0217] In some embodiments, MM1 has a polypeptide sequence that is no more than 50% identical to any natural binding partner of the corresponding AB. In some embodiments, MM1 has a polypeptide sequence that is no more than 25% identical to any natural binding partner of the corresponding AB. In some embodiments, MM1 has a polypeptide sequence that is no more than 10% identical to any natural binding partner of the corresponding AB.

[0218] In some embodiments, the coupling of MM1 reduces the ability of the corresponding AB to bind its target or epitope such that the dissociation constant (K_{d}) of the AB when coupled to the MM1 towards its corresponding target or epitope is at least 20 times greater than the K_{d} of the AB when not coupled to the MM1 towards its corresponding target or epitope.

[0219] In some embodiments, the coupling of MM1 reduces the ability of the corresponding AB to bind its target or epitope such that the dissociation constant (K_{d}) of the AB when coupled to the MM1 towards its corresponding target or epitope is at least 40 times greater than the K_{d} of the AB when not coupled to the MM1 towards its corresponding target or epitope.

[0220] In some embodiments, the coupling of MM1 reduces the ability of the corresponding AB to bind its target or epitope such that the dissociation constant (K_{d}) of the AB when coupled to the MM1 towards its corresponding target or epitope is at least 100 times greater than the K_{d} of the AB when not coupled to the MM1 towards its corresponding target or epitope.

[0221] In some embodiments, the coupling of MM1 reduces the ability of the corresponding AB to bind its target or epitope such that the dissociation constant (K_{d}) of the AB when coupled to the MM1 towards its corresponding target or epitope is at least 1000 times greater than the K_{d} of the AB when not coupled to the MM1 towards its corresponding target or epitope.

[0222] In some embodiments, the coupling of MM1 reduces the ability of the corresponding AB to bind its target or epitope such that the dissociation constant (K_{d}) of the AB when coupled to the MM1 towards its corresponding target or epitope is at least 10,000 times greater than the K_{d} of the AB when not coupled to the MM1 towards its corresponding target or epitope.

[0223] In some embodiments, MM1 is an amino acid sequence selected from a MM shown in the Examples provided herein.

[0224] In some embodiments, the multispecific activatable antibody includes at least a second masking moiety (MM2) that inhibits the binding of the AB2 to its target when the multispecific activatable antibody is in an uncleaved state, and a second cleavable moiety (CM2) coupled to the AB2, wherein the CM2 is a polypeptide that functions as a substrate for a second protease. In some embodiments, CM2 is a polypeptide of no more than 15 amino acids long. In some embodiments, the second protease is produced by a tumor that is in proximity to cells that express the target and/or produced by a tumor that is co-localized with the second target or epitope in a tissue, and wherein the second protease cleaves the CM2 in the multispecific activatable antibody when the multispecific activatable antibody is exposed to the second protease. In some embodiments, the first protease and the second protease are produced by a tumor that is in proximity to cells that express the target and/or produced by a tumor that is co-localized with the first target or epitope and the second target or epitope in a tissue. In some embodiments, the first protease and the second protease are the same protease. In some embodiments, CM1 and CM2 are different substrates for the same protease. In some embodiments, the protease is selected from the group consisting of those shown in Table 3. In some embodiments, the first protease and the second protease are different proteases. In some embodiments, the first protease and the second protease are different proteases selected from the group consisting of those shown in Table 3.

[0225] In some embodiments, each of the MM in the multispecific activatable antibody has a dissociation constant, i.e., dissociation constant at an equilibrium state, K_{d} for binding to the AB that is greater than the K_{d} for binding of the AB to its corresponding target or epitope.

[0226] In some embodiments, each of the MM in the multispecific activatable antibody has a K_{d} for binding to the AB that is no more than the K_{d} for binding of the AB to its corresponding target or epitope.

[0227] In some embodiments, each of the MM in the multispecific activatable antibody has a K_{d} for binding to the AB that is no less than the K_{d} for binding of the AB to its corresponding target or epitope.

[0228] In some embodiments, each of the MM in the multispecific activatable antibody has a K_{d} for binding to the AB that is approximately equal to the K_{d} for binding of the AB to its corresponding target or epitope.

[0229] In some embodiments, each of the MM in the multispecific activatable antibody has a K_{d} for binding to the AB that is less than the K_{d} for binding of the AB to its corresponding target or epitope.

[0230] In some embodiments, each of the MM in the multispecific activatable antibody has a IQ for binding to the AB that is no more than 2, 3, 4, 5, 10, 25, 50, 100, 250, 500, or 1,000 fold greater than the K_{d} for binding of the AB to its corresponding target or epitope. In some embodiments, each of the MM in the multispecific activatable antibody has a K_{d} for binding to the AB that is between 1-5, 2-5, 2-10, 5-10, 5-20, 5-50, 5-100, 10-100, 10-1,000, 20-100, 20-1000, or 100-1,000 fold greater than the K_{d} for binding of the AB to its corresponding target or epitope.

[0231] In some embodiments, each of the MM in the multispecific activatable antibody has an affinity for binding to the AB that is less than the affinity of binding of the AB to its corresponding target or epitope.

[0232] In some embodiments, each of the MM in the multispecific activatable antibody has an affinity for binding to the AB that is no more than the affinity of binding of the AB to its corresponding target or epitope.

[0233] In some embodiments, each of the MM in the multispecific activatable antibody has an affinity for binding to the AB that is approximately equal of the affinity of binding of the AB to its corresponding target or epitope.

[0234] In some embodiments, each of the MM in the multispecific activatable antibody has an affinity for binding to the AB that is no less than the affinity of binding of the AB to its corresponding target or epitope.

[0235] In some embodiments, each of the MM in the multispecific activatable antibody has an affinity for binding to the AB that is greater than the affinity of binding of the AB to its corresponding target or epitope.

[0236] In some embodiments, each of the MM in the multispecific activatable antibody has an affinity for binding to the AB that is 2, 3, 4, 5, 10, 25, 50, 100, 250, 500, or 1,000 less than the affinity of binding of the AB to its corresponding target or epitope. In some embodiments, each of the MM in the multispecific activatable antibody has an affinity for binding to the AB that is between 1-5, 2-5, 2-10, 5-10, 5-20, 5-50, 5-100, 10-100, 10-1,000, 20-100, 20-1000, or 100-1,000 fold less than the affinity of binding of the AB to its corresponding target or epitope. In some embodiments, each of the MM in the multispecific activatable antibody has an affinity for binding to the AB that is 2 to 20 fold less than the affinity of binding of the AB to its corresponding target or epitope. In some embodiments, a MM not covalently linked to the AB and at equimolar concentration to the AB does not inhibit the binding of the AB to its corresponding target or epitope.

[0237] In some embodiments, each of the MM in the multispecific activatable antibody does not interfere or compete with its corresponding AB for binding to the corresponding target or epitope when the multispecific activatable antibody is in a cleaved state.

[0238] In some embodiments, each of the MM in the multispecific activatable antibody is a polypeptide of about 2 to 40 amino acids in length. In some embodiments, each of the MM in the multispecific activatable antibody is a polypeptide of no more than 40 amino acids in length.

[0239] In some embodiments, each of the MM in the multispecific activatable antibody has a polypeptide sequence that is different from that of target of the corresponding AB.

[0240] In some embodiments, each of the MM in the multispecific activatable antibody has a polypeptide sequence that is no more than 50% identical to any natural binding partner of the corresponding AB. In some embodiments, each of the MM in the multispecific activatable antibody has a polypeptide sequence that is no more than 25% identical to any natural binding partner of the corresponding AB. In some embodiments, each of the MM in the multispecific activatable antibody has a polypeptide sequence that is no more than 10% identical to any natural binding partner of the corresponding AB.

[0241] In some embodiments, the coupling of each of the MM reduces the ability of the corresponding AB to bind its target or epitope such that the dissociation constant (K_{d}) of the AB when coupled to the MM towards its corresponding target or epitope is at least 20 times greater than the K_{d} of the AB when not coupled to the MM towards its corresponding target or epitope.

[0242] In some embodiments, the coupling of each of the MM reduces the ability of the corresponding AB to bind its target or epitope such that the dissociation constant (K_{d}) of the AB when coupled to the MM towards its corresponding target or epitope is at least 40 times greater than the K_{d} of the AB when not coupled to the MM towards its corresponding target or epitope.

[0243] In some embodiments, the coupling of each of the MM reduces the ability of the corresponding AB to bind its target or epitope such that the dissociation constant (K_{d}) of the AB when coupled to the MM towards its corresponding target or epitope is at least 100 times greater than the K_{d} of the AB when not coupled to the MM towards its corresponding target or epitope.

[0244] In some embodiments, the coupling of each of the MM reduces the ability of the corresponding AB to bind its target or epitope such that the dissociation constant (K_{d}) of the AB when coupled to the MM towards its corresponding target or epitope is at least 1000 times greater than the K_{d} of the AB when not coupled to the MM towards its corresponding target or epitope.

[0245] In some embodiments, the coupling of each of the MM reduces the ability of the corresponding AB to bind its target or epitope such that the dissociation constant (K_{d}) of the AB when coupled to the MM towards its corresponding target or epitope is at least 10,000 times greater than the K_{d} of the AB when not coupled to the MM towards its corresponding target or epitope.

[0246] In some embodiments, the coupling of each of the MM reduces the ability of the corresponding AB to bind its target or epitope such that the dissociation constant (K_{d}) of the AB1 when coupled to the MM1 is at least 20 times greater than the K_{d} of the AB2 when coupled to the MM2. In some embodiments, the coupling of each of the MM reduces the ability of the corresponding AB to bind its target or epitope such that the dissociation constant (K_{d}) of the AB1 when coupled to the MM1 is at least 20 times lower than the K_{d} of the AB2 when coupled to the MM2.

[0247] In some embodiments, the coupling of each of the MM reduces the ability of the corresponding AB to bind its target or epitope such that the dissociation constant (K_{d}) of the AB1 when coupled to the MM1 is at least 40 times greater than the K_{d} of the AB2 when coupled to the MM2. In some embodiments, the coupling of each of the MM reduces the ability of the corresponding AB to bind its target or epitope such that the dissociation constant (K_{d}) of the AB1 when coupled to the MM1 is at least 40 times lower than the K_{d} of the AB2 when coupled to the MM2.

[0248] In some embodiments, the coupling of each of the MM reduces the ability of the corresponding AB to bind its target or epitope such that the dissociation constant (K_{d}) of the AB1 when coupled to the MM1 is at least 100 times greater than the K_{d} of the AB2 when coupled to the MM2. In some embodiments, the coupling of each of the MM reduces the ability of the corresponding AB to bind its target or epitope such that the dissociation constant (K_{d}) of the AB1 when coupled to the MM1 is at least 100 times lower than the K_{d} of the AB2 when coupled to the MM2.

[0249] In some embodiments, the coupling of each of the MM reduces the ability of the corresponding AB to bind its target or epitope such that the dissociation constant (K_{d}) of the AB1 when coupled to the MM1 is at least 1,000 times greater than the K_{d} of the AB2 when coupled to the MM2. In some embodiments, the coupling of each of the MM reduces the ability of the corresponding AB to bind its target or epitope such that the dissociation constant (K_{d}) of the AB1 when coupled to the MM1 is at least 1,000 times lower than the K_{d} of the AB2 when coupled to the MM2.

[0250] In some embodiments, the coupling of each of the MM reduces the ability of the corresponding AB to bind its target or epitope such that the dissociation constant (K_{d}) of the AB1 when coupled to the MM1 is at least 10,000 times greater than the K_{d} of the AB2 when coupled to the MM2. In some embodiments, the coupling of each of the MM reduces the ability of the corresponding AB to bind its target or epitope such that the dissociation constant (K_{d}) of the AB1 when coupled to the MM1 is at least 10,000 times lower than the K_{d} of the AB2 when coupled to the MM2.

[0251] In some embodiments, each of the MM is an amino acid sequence selected from a MM shown in the Examples provided herein.

[0252] In some embodiments, the protease that cleaves the first cleavable moiety (CM1) sequence is produced by a tumor that is in proximity to cells that express the target and/or produced by a tumor that is co-localized with the target of the AB1 in the multispecific activatable antibody in a tissue, and the protease cleaves the CM1 in the multispecific activatable antibody when the multispecific activatable antibody is exposed to the protease.

[0253] In some embodiments, the multispecific activatable antibody includes more than one cleavable moiety sequence, and the protease that cleaves at least one cleavable moiety sequence is produced by a tumor that is in proximity to cells that express the target and/or produced by a tumor that is co-localized with the target of at least one of the AB regions in the multispecific activatable antibody in a tissue, and the protease cleaves the CM in the multispecific activatable antibody when the multispecific activatable antibody is exposed to the protease.

[0254] In some embodiments, each CM, e.g., CM1 and at least CM2, is positioned in the multispecific activatable antibody such that when the activatable antibody is in the uncleaved state, binding of the multispecific activatable antibody to a target of one of the AB regions is reduced to occur with a dissociation constant that is at least 20-fold greater than the dissociation constant of an unmodified AB binding to its target, and whereas when the activatable antibody is in the cleaved state, the AB binds its target.

[0255] In some embodiments, each CM is positioned in the multispecific activatable antibody such that when the activatable antibody is in the uncleaved state, binding of the multispecific activatable antibody to a target of one of the AB regions is reduced to occur with a dissociation constant that is at least 40-fold greater than the dissociation constant of an unmodified AB binding to its target, and whereas when the activatable antibody is in the cleaved state, the AB binds its target.

[0256] In some embodiments, each CM is positioned in the multispecific activatable antibody such when the activatable antibody is that in the uncleaved state, binding of the multispecific activatable antibody to a target of one of the AB regions is reduced to occur with a dissociation constant that is at least 50-fold greater than the dissociation constant of an unmodified AB binding to its target, and whereas when the activatable antibody is in the cleaved state, the AB binds its target.

[0257] In some embodiments, each CM is positioned in the multispecific activatable antibody such when the activatable antibody is that in the uncleaved state, binding of the multispecific activatable antibody to a target of one of the AB regions is reduced to occur with a dissociation constant that is at least 100-fold greater than the dissociation constant of an unmodified AB binding to its target, and whereas when the activatable antibody is in the cleaved state, the AB binds its target.

[0258] In some embodiments, each CM is positioned in the multispecific activatable antibody such that when the activatable antibody is in the uncleaved state, binding of the multispecific activatable antibody to a target of one of the AB regions is reduced to occur with a dissociation constant that is at least 200-fold greater than the dissociation constant of an unmodified AB binding to its target, and whereas when the activatable antibody is in the cleaved state, the AB binds its target.

[0259] In some embodiments, each CM in the multispecific activatable antibody is a polypeptide of up to 15 amino acids in length.

[0260] In some embodiments, at least one CM in the multispecific activatable antibody includes the amino acid sequence LSGRSDNH (SEQ ID NO: 67). In some embodiments, at least one cleavable moiety is selected for use with a specific protease, for example a protease that is known to be produced by a tumor that is in proximity to cells that express the target and/or produced by a tumor that is co-localized with at least one target of the multispecific activatable antibody. For example, suitable cleavable moieties for use in the multispecific activatable antibodies of the disclosure are cleaved by at least a protease such as urokinase, legumain, and/or matriptase (also referred to herein as MT-SP1 or MTSP1). In some embodiments, a suitable cleavable moiety includes at least one of the following sequences: TGRGPSWV (SEQ ID NO: 68); SARGPSRW (SEQ ID NO: 69); TARGPSFK (SEQ ID NO: 70); LSGRSDNH (SEQ ID NO: 67); GGWHTGRN (SEQ ID NO: 71); HTGRSGAL (SEQ ID NO: 72); PLTGRSGG (SEQ ID NO: 73); AARGPAIH (SEQ ID NO: 74); RGPAFNPM (SEQ ID NO: 75); SSRGPAYL (SEQ ID NO: 76); RGPATPIM (SEQ ID NO: 77); RGPA (SEQ ID NO: 78); GGQPSGMWGW (SEQ ID NO: 79); FPRPLGITGL (SEQ ID NO: 80); VHMPLGFLGP (SEQ ID NO: 81); SPLTGRSG (SEQ ID NO: 82); SAGFSLPA (SEQ ID NO: 83); LAPLGLQRR (SEQ ID NO: 84); SGGPLGVR (SEQ ID NO: 85); and/or PLGL (SEQ ID NO: 86).

[0261] In some embodiments, each CM in the multispecific activatable antibody is a substrate for a protease selected from the group consisting of those shown in Table 3. In some embodiments, the protease is selected from the group consisting of uPA, legumain, matriptase, ADAM17, BMP-1, TMPRSS3, TMPRSS4, neutrophil elastase, MMP-7, MMP-9, MMP-12, MMP-13, and MMP-14. In some embodiments, the protease is a cathepsin, such as, but not limited to, cathepsin S. In some embodiments, each CM in the multispecific activatable antibody is a substrate for a protease selected from the group consisting of uPA (urokinase plasminogen activator), legumain and matriptase. In some embodiments, the protease comprises uPA. In some embodiments, the protease comprises legumain. In some embodiments, the protease comprises matriptase. In some embodiments, the protease comprises a matrix metalloproteinase (MMP).

[0262] In some embodiments, at least one CM in the multispecific activatable antibody is a substrate for at least two proteases. In some embodiments, each protease is selected from the group consisting of those shown in Table 3. In some embodiments, at least one CM in the multispecific activatable antibody is a substrate for at least two proteases, wherein one of the proteases is selected from the group consisting of uPA, legumain and matriptase and the other protease is selected from the group consisting of those shown in Table 3. In some embodiments, at least one CM in the multispecific activatable antibody is a substrate for at least two proteases selected from the group consisting of uPA, legumain and matriptase.

[0263] In some embodiments, at least one of the proteases that can cleave each CM in the multispecific activatable antibody is the same protease. In some embodiments, the same protease that can cleave both CMs in the multispecific activatable antibody is selected from the group consisting of those shown in Table 3. In some embodiments, the same protease that can cleave both CMs in the multispecific activatable antibody are selected from the group consisting of uPA, legumain and matriptase.

[0264] In some embodiments, at least two of the proteases that can cleave each CM in the multispecific activatable antibody are the same two proteases. In some embodiments, the same two proteases that can cleave both CMs in the multispecific activatable antibody are selected from the group consisting of those shown in Table 3. In some embodiments, at least one of the at least the two proteases that can cleave both CMs in the multispecific activatable antibody is selected from the group consisting of uPA, legumain and matriptase, and the other protease of the at least the two proteases is selected from the group consisting of those shown in Table 3. In some embodiments, the at least the two proteases that can cleave both CMs in the multispecific activatable antibody are selected from the group consisting of uPA, legumain and matriptase.

[0265] In some embodiments, at least one of the proteases that can cleave CM1 is different than at least one of the proteases that can cleave CM2 in the multispecific activatable antibody. In some embodiments, at least one of the proteases that can cleave CM1 but cannot cleave CM2 in the multispecific activatable antibody. In some embodiments, at least one of the proteases that can cleave CM2 but cannot cleave CM1 in the multispecific activatable antibody. In some embodiments, the at least one protease that can cleave CM1 but cannot cleave CM2 in the multispecific activatable antibody is selected from the group consisting of those shown in Table 3. In some embodiments, the at least one protease that can cleave CM1 but cannot cleave CM2 in the multispecific activatable is selected from the group consisting of uPA, legumain and matriptase.

[0266] In some embodiments, the multispecific activatable antibody includes at least a first CM (CM1) and a second CM (CM2). In some embodiments, CM1 and CM2 are part of a single cleavable linker that joins an MM to an AB. In some embodiments, CM1 is part of a cleavable linker that joins MM1 to AB1, and CM2 is part of a separate cleavable linker that joins an MM2 to AB2. In some embodiments, a multispecific activatable antibody comprises more than two CMs. In some embodiments, such a multispecific activatable antibody comprises more than two CMs and more than two MMs. In some embodiments, CM1 and CM2 are each polypeptides of no more than 15 amino acids long. In some embodiments, at least one of the first CM and the second CM is a polypeptide that functions as a substrate for a protease selected from the group consisting of those listed in Table 3. In some embodiments, at least one of the first CM and the second CM is a polypeptide that functions as a substrate for a protease selected from the group consisting of uPA, legumain, and matriptase. In some embodiments, the first CM is cleaved by a first cleaving agent selected from the group consisting of uPA, legumain, and matriptase in a target tissue and the second CM is cleaved by a second cleaving agent in a target tissue. In some embodiments, the other protease is selected from the group consisting of those shown in Table 3. In some embodiments, the first cleaving agent and the second cleaving agent are the same protease selected from the group consisting of those listed in Table 3, and the first CM and the second CM are different substrates for the protease. In some embodiments, the first cleaving agent and the second cleaving agent are the same protease selected from the group consisting of uPA, legumain, and matriptase, and the first CM and the second CM are different substrates for the protease. In some embodiments, the first cleaving agent and the second cleaving agent are the same protease selected from the group listed in Table 3, and the first CM and the second CM are the same substrate. In some embodiments, the first cleaving agent and the second cleaving agent are different proteases. In some embodiments, the first cleaving agent and the second cleaving agent are different proteases selected from the group consisting of those shown in Table 3. In some embodiments, the first cleaving agent and the second cleaving agent are produced by a tumor that is in proximity to cells that express the target and/or produced by a tumor that is co-localized in the target tissue. In some embodiments, the first CM and the second CM are cleaved by at least one cleaving agent in the target tissue.

[0267] In some embodiments, the multispecific activatable antibody is exposed to and cleaved by a protease such that, when the activatable antibody is in the activated or cleaved state, the activated multispecific activatable antibody includes a light chain amino acid sequence that includes at least a portion of LP2 and/or CM sequence after the protease has cleaved the CM.

[0268] In some embodiments, the multispecific activatable antibody also includes a signal peptide. In some embodiments, the signal peptide is conjugated to the multispecific activatable antibody via a spacer. In some embodiments, the spacer is conjugated to the multispecific activatable antibody in the absence of a signal peptide. In some embodiments, the spacer is joined directly to at least one of the MM of the multispecific activatable antibody.

[0269] In some embodiments, the multispecific activatable antibody in an uncleaved state comprises a spacer that is joined directly to a first MM and has the structural arrangement from N-terminus to C-terminus of spacer-MM1-CM-AB1. In some embodiments, the spacer includes at least the amino acid sequence QGQSGQ (SEQ ID NO: 87).

[0270] In some embodiments, the serum half-life of the multispecific activatable antibody is longer than that of the corresponding multispecific antibody; e.g., the pK of the multispecific activatable antibody is longer than that of the corresponding multispecific antibody. In some embodiments, the serum half-life of the multispecific activatable antibody is similar to that of the corresponding multispecific antibody. In some embodiments, the serum half-life of the multispecific activatable antibody is at least 15 days when administered to an organism. In some embodiments, the serum half-life of the multispecific activatable antibody is at least 12 days when administered to an organism. In some embodiments, the serum half-life of the multispecific activatable antibody is at least 11 days when administered to an organism. In some embodiments, the serum half-life of the multispecific activatable antibody is at least 10 days when administered to an organism. In some embodiments, the serum half-life of the multispecific activatable antibody is at least 9 days when administered to an organism. In some embodiments, the serum half-life of the multispecific activatable antibody is at least 8 days when administered to an organism. In some embodiments, the serum half-life of the multispecific activatable antibody is at least 7 days when administered to an organism. In some embodiments, the serum half-life of the multispecific activatable antibody is at least 6 days when administered to an organism. In some embodiments, the serum half-life of the multispecific activatable antibody is at least 5 days when administered to an organism. In some embodiments, the serum half-life of the multispecific activatable antibody is at least 4 days when administered to an organism. In some embodiments, the serum half-life of the multispecific activatable antibody is at least 3 days when administered to an organism. In some embodiments, the serum half-life of the multispecific activatable antibody is at least 2 days when administered to an organism. In some embodiments, the serum half-life of the multispecific activatable antibody is at least 24 hours when administered to an organism. In some embodiments, the serum half-life of the multispecific activatable antibody is at least 20 hours when administered to an organism. In some embodiments, the serum half-life of the multispecific activatable antibody is at least 18 hours when administered to an organism. In some embodiments, the serum half-life of the multispecific activatable antibody is at least 16 hours when administered to an organism. In some embodiments, the serum half-life of the multispecific activatable antibody is at least 14 hours when administered to an organism. In some embodiments, the serum half-life of the multispecific activatable antibody is at least 12 hours when administered to an organism. In some embodiments, the serum half-life of the multispecific activatable antibody is at least 10 hours when administered to an organism. In some embodiments, the serum half-life of the multispecific activatable antibody is at least 8 hours when administered to an organism. In some embodiments, the serum half-life of the multispecific activatable antibody is at least 6 hours when administered to an organism. In some embodiments, the serum half-life of the multispecific activatable antibody is at least 4 hours when administered to an organism. In some embodiments, the serum half-life of the multispecific activatable antibody is at least 3 hours when administered to an organism.

[0271] The disclosure also provides compositions and methods that include a multispecific activatable antibody that includes at least a first antibody or antibody fragment (AB1) that specifically binds a target and a second antibody or antibody fragment (AB2), where at least the first AB in the multispecific activatable antibody is coupled to a masking moiety (MM1) that decreases the ability of AB1 to bind its target. In some embodiments, each AB is coupled to a MM that decreases the ability of its corresponding AB to each target. For example, in bispecific activatable antibody embodiments, AB1 is coupled to a first masking moiety (MM1) that decreases the ability of AB1 to bind its target, and AB2 is coupled to a second masking moiety (MM2) that decreases the ability of AB2 to bind its target. In some embodiments, the multispecific activatable antibody comprises more than two AB regions; in such embodiments, AB1 is coupled to a first masking moiety (MM1) that decreases the ability of AB1 to bind its target, AB2 is coupled to a second masking moiety (MM2) that decreases the ability of AB2 to bind its target, AB3 is coupled to a third masking moiety (MM3) that decreases the ability of AB3 to bind its target, and so on for each AB in the multispecific activatable antibody.

[0272] In some embodiments, the multispecific activatable antibody further includes at least one cleavable moiety (CM) that is a substrate for a protease, where the CM links a MM to an AB. For example, in some embodiments, the multispecific activatable antibody includes at least a first antibody or antibody fragment (AB1) that specifically binds a target and a second antibody or antibody fragment (AB2), where at least the first AB in the multispecific activatable antibody is coupled via a first cleavable moiety (CM1) to a masking moiety (MM1) that decreases the ability of AB1 to bind its target. In some bispecific activatable antibody embodiments, AB1 is coupled via CM1 to MM1, and AB2 is coupled via a second cleavable moiety (CM2) to a second masking moiety (MM2) that decreases the ability of AB2 to bind its target. In some embodiments, the multispecific activatable antibody comprises more than two AB regions; in some of these embodiments, AB1 is coupled via CM1 to MM1, AB2 is coupled via CM2 to MM2, and AB3 is coupled via a third cleavable moiety (CM3) to a third masking moiety (MM3) that decreases the ability of AB3 to bind its target, and so on for each AB in the multispecific activatable antibody.

[0273] In some embodiments, the multispecific antibodies and/or multispecific activatable antibodies described herein are used in conjunction with one or more additional agents or a combination of additional agents. Suitable additional agents include current pharmaceutical and/or surgical therapies for an intended application, such as, for example, cancer. For example, the multispecific antibodies and/or multispecific activatable antibodies can be used in conjunction with an additional chemotherapeutic or anti-neoplastic agent.

[0274] In some embodiments, the multispecific antibody and/or multispecific activatable antibody and additional agent are formulated into a single therapeutic composition, and the multispecific antibody and/or multispecific activatable antibody and additional agent are administered simultaneously. In some embodiments, the multispecific antibody and/or multispecific activatable antibody and additional agent are separate from each other, e.g., each is formulated into a separate therapeutic composition, and the multispecific antibody and/or multispecific activatable antibody and the additional agent are administered simultaneously, or the multispecific antibody and/or multispecific activatable antibody and the additional agent are administered at different times during a treatment regimen. For example, the multispecific antibody and/or multispecific activatable antibody is administered prior to the administration of the additional agent, the multispecific antibody and/or multispecific activatable antibody is administered subsequent to the administration of the additional agent, or the multispecific antibody and/or multispecific activatable antibody and the additional agent are administered in an alternating fashion. As described herein, the anti-multispecific antibody and/or multispecific activatable antibody and additional agent are administered in single doses or in multiple doses.

[0275] The disclosure also provides an isolated nucleic acid molecule encoding at least a portion of a multispecific antibody and/or multispecific activatable antibody described herein, such as for example, at least a first nucleic acid encoding at least a portion of the heavy chain of the multispecific antibody and/or multispecific activatable antibody and a second nucleic acid encoding at least a portion of the light chain of multispecific antibody and/or multispecific the activatable antibody, as well as vectors that include these isolated nucleic acid sequences. The disclosure provides methods of producing a multispecific antibody and/or multispecific activatable antibody by culturing a cell under conditions that lead to expression of the multispecific antibody and/or multispecific activatable antibody, wherein the cell comprises such a nucleic acid molecule(s). In some embodiments, the cell comprises such a vector.

[0276] The disclosure also provides a method of manufacturing multispecific antibodies of the disclosure and/or multispecific activatable antibodies of the disclosure by (a) culturing a cell comprising a nucleic acid construct that encodes the multispecific antibody and/or multispecific activatable antibody under conditions that lead to expression of the multispecific antibody and/or multispecific activatable, and (b) recovering the multispecific antibody and/or multispecific activatable antibody.

[0277] The present disclosure also provides methods of treating, preventing, delaying the progression of or otherwise ameliorating a symptom of one or more pathologies or alleviating a symptom associated with such pathologies, by administering an anti-CD3ε antibody, an activatable anti-CD3ε antibody, a multispecific antibody that specifically binds CD3ε and/or a multispecific activatable antibody of the disclosure that specifically binds CD3ε to a subject in which such treatment or prevention is desired. The subject to be treated is, e.g., human or other mammal. In some embodiments, the subject is a non-human mammal, such as a non-human primate, companion animal (e.g., cat, dog, horse), farm animal, work animal, or zoo animal. In some embodiments, the subject is a rodent.

[0278] The present disclosure also provides methods to induce target-dependent T-cell activation and killing of a target cell by administering a multispecific activatable antibody of the disclosure to a subject in which such induction is desired, wherein when the multispecific activatable antibody is in the cleaved state, e.g., each masking moiety in the multispecific activatable antibody is no longer attached or otherwise associated with the corresponding AB domain, target-dependent T-cell activation and killing of the target cell occurs, and when the multispecific activatable antibody is in the uncleaved state, e.g. at least one masking moiety of the multispecific activatable antibody is attached or otherwise associated with the corresponding AB domain, target-dependent T-cell activation and killing of the target cell is reduced or otherwise inhibited. Any of the multispecific activatable antibodies described herein are suitable for use in such methods. The subject to be treated is, e.g., human or other mammal. In some embodiments, the subject is a non-human mammal, such as a non-human primate, companion animal (e.g., cat, dog, horse), farm animal, work animal, or zoo animal. In some embodiments, the subject is a rodent.

[0279] An anti-CD3ε antibody, an activatable anti-CD3ε antibody, a multispecific antibody that specifically binds CD3ε and/or a multispecific activatable antibody of the disclosure that specifically binds CD3ε used in any of the embodiments of these methods and uses can be administered at any stage of the disease. For example, such an antibody, an activatable antibody, a multispecific antibody and/or a multispecific activatable antibody can be administered to a patient suffering cancer of any stage, from early to metastatic. The terms subject and patient are used interchangeably herein.

[0280] An anti-CD3ε antibody, an activatable anti-CD3ε antibody, a multispecific antibody that specifically binds CD3ε and/or a multispecific activatable antibody of the disclosure that specifically binds CD3ε used in any of the embodiments of these methods and uses can be used in a treatment regimen comprising neoadjuvant therapy.

[0281] An anti-CD3ε antibody, an activatable anti-CD3ε antibody, a multispecific antibody that specifically binds CD3ε and/or a multispecific activatable antibody of the disclosure that specifically binds CD3ε used in any of the embodiments of these methods and uses can be administered either alone or in combination with one or more additional agents, including small molecule inhibitors, other antibody-based therapies, polypeptide or peptide-based therapies, nucleic acid-based therapies and/or other biologics. In some embodiments, an antibody, an activatable antibody, a multispecific antibody, and/or a multispecific activatable antibody is administered in combination with one or more additional agents such as, by way of non-limiting example, a chemotherapeutic agent, such as an alkylating agent, an anti-metabolite, an anti-microtubule agent, a topoisomerase inhibitor, a cytotoxic antibiotic, and any other nucleic acid damaging agent. In some embodiments, the additional agent is a taxane, such as paclitaxel (e.g., Abraxane®). In some embodiments, the additional agent is an anti-metabolite, such as gemcitabine. In some embodiments, the additional agent is an alkylating agent, such as platinum-based chemotherapy, such as carboplatin or cisplatin. In some embodiments, the additional agent is a targeted agent, such as a kinase inhibitor, e.g., sorafenib or erlotinib. In some embodiments, the additional agent is a targeted agent, such as another antibody, e.g., a monoclonal antibody (e.g., bevacizumab), a bispecific antibody, or a multispecific antibody. In some embodiments, the additional agent is a proteosome inhibitor, such as bortezomib or carfilzomib. In some embodiments, the additional agent is an immune modulating agent, such as lenolidominde or IL-2. In some embodiments, the additional agent is radiation. In some embodiments, the additional agent is an agent considered standard of care by those skilled in the art. In some embodiments, the additional agent is a chemotherapeutic agent well known to those skilled in the art. In some embodiments, the antibody, activatable antibody, multispecific antibody, and/or multispecific activatable antibody, and the additional agent(s) are formulated in a single composition. In some embodiments, the antibody, activatable antibody, multispecific antibody, and/or multispecific activatable antibody, and the additional agent(s) are administered as two or more separate compositions. In some embodiments, the antibody, activatable antibody, multispecific antibody, and/or multispecific activatable antibody, and the additional agent(s) are administered simultaneously. In some embodiments, the antibody, activatable antibody, multispecific antibody, and/or multispecific activatable antibody, and the additional agent(s) are administered sequentially.

[0282] In some embodiments, the additional agent(s) is a chemotherapeutic agent, such as a chemotherapeutic agent selected from the group consisting of docetaxel, paclitaxel, abraxane (i.e., albumin-conjugated paclitaxel), doxorubicin, oxaliplatin, carboplatin, cisplatin, irinotecan, and gemcitabine.

[0283] In some embodiments, the additional agent(s) is a checkpoint inhibitor, a kinase inhibitor, an agent targeting inhibitors in the tumor microenvironment, and/or a T cell or NK agonist. In some embodiments, the additional agent(s) is radiation therapy, alone or in combination with another additional agent(s) such as a chemotherapeutic or anti-neoplastic agent. In some embodiments, the additional agent(s) is a vaccine, an oncovirus, and/or a DC-activating agent such as, by way of non-limiting example, a toll-like receptor (TLR) agonist and/or α-CD40. In some embodiments, the additional agent(s) is a tumor-targeted antibody designed to kill the tumor via ADCC or via direct conjugation to a toxin (e.g., an antibody drug conjugate (ADC).

[0284] In some embodiments, the checkpoint inhibitor is an inhibitor of a target selected from the group consisting of CTLA-4, LAG-3, PD-1, PDL1, TIGIT, TIM-3, B7H4, and Vista. In some embodiments, the kinase inhibitor is selected from the group consisting of B-RAFi, MEKi, and Btk inhibitors, such as ibrutinib. In some embodiments, the kinase inhibitor is crizotinib. In some embodiments, the tumor microenvironment inhibitor is selected from the group consisting of an IDO inhibitor, an α-CSF1R inhibitor, an α-CCR4 inhibitor, a TGF-beta, a myeloid-derived suppressor cell, or a T-regulatory cell. In some embodiments, the agonist is selected from the group consisting of Ox40, GITR, CD137, ICOS, CD27, and HVEM. In some embodiments, the checkpoint inhibitor is an antibody that binds a target selected from CTLA-4, PD-1, and/or PD-L1. In some embodiments, the checkpoint inhibitor is an anti-CTLA4 antibody, an anti-PD-1 antibody, and an anti-PD-L1 antibody, and/or combinations thereof. In some embodiments, the checkpoint inhibitor is an anti-CTLA4 antibody such as, e.g., Yervoy™. In some embodiments, the checkpoint inhibitor is an anti-PD-1 antibody such as, e.g., Opdivo™ and/or Keytruda™.

[0285] In some embodiments, the inhibitor is a CTLA-4 inhibitor. In some embodiments, the inhibitor is a LAG-3 inhibitor. In some embodiments, the inhibitor is a PD-1 inhibitor. In some embodiments, the inhibitor is a PDL1 inhibitor. In some embodiments, the inhibitor is a TIGIT inhibitor. In some embodiments, the inhibitor is a TIM-3 inhibitor. In some embodiments, the inhibitor is a B7H4 inhibitor. In some embodiments, the inhibitor is a Vista inhibitor. In some embodiments, the inhibitor is a B-RAFi inhibitor. In some embodiments, the inhibitor is a MEKi inhibitor. In some embodiments, the inhibitor is a Btk inhibitor. In some embodiments, the inhibitor is ibrutinib. In some embodiments, the inhibitor is crizotinib. In some embodiments, the inhibitor is an IDO inhibitor. In some embodiments, the inhibitor is an α-CSF1R inhibitor. In some embodiments, the inhibitor is an α-CCR4 inhibitor. In some embodiments, the inhibitor is a TGF-beta. In some embodiments, the inhibitor is a myeloid-derived suppressor cell. In some embodiments, the inhibitor is a T-regulatory cell.

[0286] In some embodiments, the agonist is Ox40. In some embodiments, the agonist is GITR. In some embodiments, the agonist is CD137. In some embodiments, the agonist is ICOS. In some embodiments, the agonist is CD27. In some embodiments, the agonist is HVEM.

[0287] In some embodiments, the additional agent is another antibody or antigen-binding fragment thereof, another conjugated antibody or antigen-binding fragment thereof, another activatable antibody or antigen-binding fragment thereof and/or another conjugated activatable antibody or antigen-binding fragment thereof. In some embodiments the additional agent is another antibody or antigen-binding fragment thereof, another conjugated antibody or antigen-binding fragment thereof, another activatable antibody or antigen-binding fragment thereof and/or another conjugated activatable antibody or antigen-binding fragment thereof against the same target as the first antibody or antigen-binding fragment thereof, the first conjugated antibody or antigen-binding fragment thereof, activatable antibody or antigen-binding fragment thereof and/or a conjugated activatable antibody or antigen-binding fragment thereof, e.g., against PDL1. In some embodiments the additional agent is another antibody or antigen-binding fragment thereof, another conjugated antibody or antigen-binding fragment thereof, another activatable antibody or antigen-binding fragment thereof and/or another conjugated activatable antibody or antigen-binding fragment thereof against a target different than the target of the first antibody or antigen-binding fragment thereof, the first conjugated antibody or antigen-binding fragment thereof, activatable antibody or antigen-binding fragment thereof and/or a conjugated activatable antibody or antigen-binding fragment thereof.

[0288] In some embodiments, the anti-CD3ε antibody and/or activatable antibody is administered during and/or after treatment in combination with one or more additional agents such as, for example, a chemotherapeutic agent, an anti-inflammatory agent, and/or a an immunosuppressive agent. In some embodiments, the anti-CD3ε antibody and/or activatable antibody and the additional agent are formulated into a single therapeutic composition, and the anti-CD3ε antibody and/or activatable antibody and additional agent are administered simultaneously. Alternatively, the anti-CD3ε antibody and/or activatable antibody and additional agent are separate from each other, e.g., each is formulated into a separate therapeutic composition, and the anti-CD3ε antibody and/or activatable antibody and the additional agent are administered simultaneously, or the anti-CD3ε antibody and/or activatable antibody and the additional agent are administered at different times during a treatment regimen. For example, the anti-CD3ε antibody and/or activatable antibody is administered prior to the administration of the additional agent, the anti-CD3ε antibody and/or activatable antibody is administered subsequent to the administration of the additional agent, or the anti-CD3ε antibody and/or activatable antibody and the additional agent are administered in an alternating fashion. As described herein, the anti-CD3ε antibody and/or activatable antibody and additional agent are administered in single doses or in multiple doses.

[0289] In some embodiments, the anti-CD3ε antibody and/or activatable antibody and the additional agent(s) are administered simultaneously. For example, the anti-CD3ε antibody and/or activatable antibody and the additional agent(s) can be formulated in a single composition or administered as two or more separate compositions. In some embodiments, the anti-CD3ε antibody and/or activatable antibody and the additional agent(s) are administered sequentially, or the anti-CD3ε antibody and/or activatable antibody and the additional agent are administered at different times during a treatment regimen.

[0290] The disclosure also provides methods and kits for using the anti-CD3ε antibody, activatable anti-CD3ε antibody, multispecific antibody that specifically binds CD3ε and/or multispecific activatable antibody of the disclosure that specifically binds CD3ε in a variety of diagnostic and/or prophylactic indications. For example, the disclosure provides methods and kits for detecting presence or absence of a cleaving agent and a target of interest in a subject or a sample by (i) contacting a subject or sample with an activatable antibody or a multispecific activatable antibody that includes at least a first masking moiety (MM1), a first cleavable moiety (CM1) that is cleaved by the cleaving agent, and at least a first antigen binding domain or fragment thereof (AB1) that specifically binds the target of interest, (a) wherein the MM1 is a peptide that inhibits binding of the AB1 to the target, and wherein the MM1 does not have an amino acid sequence of a naturally occurring binding partner of the AB1 and is not a modified form of a natural binding partner of the AB1; and (b) wherein, in an uncleaved, non-activated state, the MM1 interferes with specific binding of the AB1 to the target, and in a cleaved, activated state the MM1 does not interfere or compete with specific binding of the AB1 to the target; and (ii) measuring a level of activated antibody or activated multispecific activatable antibody in the subject or sample, wherein a detectable level of activated antibody or activated multispecific activatable antibody in the subject or sample indicates that the cleaving agent and the target are present in the subject or sample and wherein no detectable level of activated antibody or activated multispecific activatable antibody in the subject or sample indicates that the cleaving agent, the target or both the cleaving agent and the target are absent and/or not sufficiently present in the subject or sample.

[0291] In some embodiments, the activatable antibody or activatable multispecific activatable antibody is an activatable antibody or an activatable multispecific activatable antibody to which a therapeutic agent is conjugated. In some embodiments, the activatable antibody or activatable multispecific activatable antibody is not conjugated to an agent. In some embodiments, the activatable antibody or activatable multispecific activatable antibody comprises a detectable label. In some embodiments, the detectable label is positioned on the AB1. In some embodiments, measuring the level of activatable antibody or multispecific activatable antibody in the subject or sample is accomplished using a secondary reagent that specifically binds to the activatable antibody or activatable multispecific activatable antibody, wherein the reagent comprises a detectable label. In some embodiments, the secondary reagent is an antibody comprising a detectable label.

[0292] In some embodiments of these methods and kits, the activatable antibody or multispecific activatable antibody includes a detectable label. In some embodiments of these methods and kits, the detectable label includes an imaging agent, a contrasting agent, an enzyme, a fluorescent label, a chromophore, a dye, one or more metal ions, or a ligand-based label. In some embodiments of these methods and kits, the imaging agent comprises a radioisotope. In some embodiments of these methods and kits, the radioisotope is indium or technetium. In some embodiments of these methods and kits, the contrasting agent comprises iodine, gadolinium or iron oxide. In some embodiments of these methods and kits, the enzyme comprises horseradish peroxidase, alkaline phosphatase, or β-galactosidase. In some embodiments of these methods and kits, the fluorescent label comprises yellow fluorescent protein (YFP), cyan fluorescent protein (CFP), green fluorescent protein (GFP), modified red fluorescent protein (mRFP), red fluorescent protein tdimer2 (RFP tdimer2), HCRED, or a europium derivative. In some embodiments of these methods and kits, the luminescent label comprises an N-methylacrydium derivative. In some embodiments of these methods, the label comprises an Alexa Fluor® label, such as Alex Fluor® 680 or Alexa Fluor® 750. In some embodiments of these methods and kits, the ligand-based label comprises biotin, avidin, streptavidin or one or more haptens.

[0293] In some embodiments of these methods and kits, the subject is a mammal. In some embodiments of these methods and kits, the subject is a human. In some embodiments, the subject is a non-human mammal, such as a non-human primate, companion animal (e.g., cat, dog, horse), farm animal, work animal, or zoo animal. In some embodiments, the subject is a rodent.

[0294] In some embodiments of these methods, the method is an in vivo method. In some embodiments of these methods, the method is an in situ method. In some embodiments of these methods, the method is an ex vivo method. In some embodiments of these methods, the method is an in vitro method.

[0295] In some embodiments of the methods and kits, the method or kit is used to identify or otherwise refine a patient population suitable for treatment with a multispecific activatable antibody of the disclosure. For example, patients that test positive for both the target and a protease that cleaves the substrate in the first cleavable moiety (CM1) of the multispecific activatable antibody being tested in these methods are identified as suitable candidates for treatment with such an activatable antibody or a multispecific activatable antibody comprising such a CM1. Likewise, patients that test negative for both the target and the protease that cleaves the substrate in the CM1 in the activatable antibody or multispecific activatable antibody being tested using these methods might be identified as suitable candidates for another form of therapy.

[0296] In some embodiments, a method or kit is used to identify or otherwise refine a patient population suitable for treatment with an activatable antibody and/or a multispecific activatable antibody of the disclosure, followed by treatment by administering that activatable antibody and/or multispecific activatable antibody to a subject in need thereof. For example, patients that test positive for both the target and a protease that cleaves the substrate in the first cleavable moiety (CM1) of the activatable antibody and/or multispecific activatable antibody being tested in these methods are identified as suitable candidates for treatment with an activatable antibody and/or a multispecific activatable antibody comprising such a CM1, and the patient is then administered a therapeutically effective amount of the activatable antibody and/or the multispecific activatable antibody that was tested. Likewise, patients that test negative for either or both of the target and the protease that cleaves the substrate in the CM1 in the activatable antibody and/or multispecific activatable antibody being tested using these methods might be identified as suitable candidates for another form of therapy.

[0297] In some embodiments, such patients can be tested with other activatable antibodies, conjugated activatable antibodies or multispecific antibodies and/or multispecific activatable antibodies and/or conjugated multispecific activatable antibodies until a suitable activatable antibody or conjugated activatable antibody or multispecific activatable antibody and/or conjugated multispecific activatable antibody for treatment is identified, e.g., an activatable antibody or a conjugated activatable antibody or a multispecific activatable antibody and/or conjugated multispecific activatable antibody comprising a CM that is cleaved by the patient at the site of disease. In some embodiments, the patient is then administered a therapeutically effective amount of the activatable antibody or conjugated activatable antibody or multispecific activatable antibody and/or conjugated multispecific activatable antibody for which the patient tested positive.

[0298] Pharmaceutical compositions according to the disclosure can include a multispecific antibody and/or a multispecific activatable antibody of the disclosure and a carrier. These pharmaceutical compositions can be included in kits, such as, for example, diagnostic kits.

[0299] One skilled in the art will appreciate that the antibodies of the disclosure have a variety of uses. For example, the proteins of the disclosure are used as therapeutic agents for a variety of disorders. The antibodies of the disclosure are also used as reagents in diagnostic kits or as diagnostic tools, or these antibodies can be used in competition assays to generate therapeutic reagents.

### BRIEF DESCRIPTION OF DRAWINGS

[0300] FIG. 1 is an illustration depicting generic mask selection population nomenclature used herein.

[0301] FIGS. 2A and 2B are a series of graphs depicting the ability of scFv formats of SP34 to bind to cynomolgus CD3ε. FIG. 1A depicts SP34scFv(LvHv)-Fc and SP34scFv(HvLv)-Fc binding as a function of Fc fusion protein concentration. FIG. 2B depicts mouse SP34-2 IgG1 binding as a function of concentration.

[0302] FIGS. 3A-3D are a series of graphs depicting the ability of masking moieties of the disclosure to reduce the ability of activatable anti-CD3ε antibodies comprising such masking moieties to bind to CD3ε on Jurkat T cells. Each activatable antibody is labeled by its masking moiety name. Antibody SP34scFv(LvHv)-Fc is identified by LvHv.

[0303] FIGS. 4A, 4B, and 4C are a series of illustrations depicting various antibodies and activatable antibodies of the disclosure. FIG. 4A depicts component pieces for scFv-Fc antibodies. FIG. 4B depicts scFv(LvHv)-Fc and scFv(HvLv)-Fc antibodies of the disclosure. FIG. 4C depicts activatable antibodies comprising scFv(LvHv)-Fc or scFv(HvLv)-Fc antibodies of the disclosure.

[0304] FIGS. 5A, 5B, 5C, and 5D are a series of illustrations depicting multispecific antibodies and multispecific activatable antibodies of the disclosure. FIG. 5A depicts a multispecific antibody of the disclosure that comprises an Ig antibody and a scFv. FIG. 5B depicts a multispecific activatable antibody of the disclosure in which the primary antibody site is masked. FIG. 5C depicts a multispecific activatable antibody of the disclosure in which the secondary scFv site is masked. FIG. 5D depicts a multispecific activatable antibody of the disclosure in which the with primary antibody and secondary scFv sites are masked.

[0305] FIGS. 6A, 6B, 6C, 6D, 6E, and 6F are a series of illustrations depicting various embodiments of multispecific activatable antibodies of the disclosure.

[0306] FIGS. 7A, 7B, 7C, 7D, 7E, 7F, 7G, 7H, 7I, and 7J are a series of schematic diagrams of a selected set of the possible permutations of multispecific antibodies of the disclosure.

[0307] FIGS. 8A, 8B, 8C, 8D, 8E, 8F, 8G, 8H, 81, and 8J are a series of schematic diagrams of a selected set of the possible permutations of multispecific activatable antibodies of the disclosure. In particular, this figure shows multispecific activatable antibodies in which the primary antigen binding site is masked (i.e., activatable) and the additional antigen-binding domain(s) is not masked.

[0308] FIGS. 9A, 9B, 9C, 9D, 9E, 9F, 9G, 9H, and 9J are a series of schematic diagrams of an array of multispecific activatable antibodies in which all antigen-binding domains are masked.

[0309] FIGS. 10A, 10B, 10C, 10D, 10E, 10F, 10G, 10H, 10I, and 10J are a series of schematic diagrams of an array of multispecific activatable antibodies in which the secondary antigen-binding domain is masked and the additional antigen-binding domain(s) is not masked.

[0310] FIGS. 11A, 11B, 11C, 11D, 11E, 11F, 11G, 11H, 11I, and 11J are a series of schematic diagrams of an array of multispecific activatable antibodies in which the majority, but not all of the antigen-binding domains, are masked and at least one additional antigen-binding domain(s) is not masked.

[0311] FIGS. 12A, 12B, 12C, and 12D are a series of schematic diagrams of an array of multispecific activatable antibodies in which the primary antigen-binding domain and another antigen-binding domain are masked, and the remaining antigen-binding domain(s) is not masked.

[0312] FIGS. 13A and 13B are a series of graphs depicting SP34 scFv-Fc binding to CD3ε positive Jurkat cells. FIG. 13A is a graph depicting the ability of both orientations of the SP34scFv-Fc to bind to CD3ε Jurkat cells. FIG. 13B is a graph depicting the binding of SP34-2 IgG. All formats of SP34 bind with similar EC₅₀ values.

[0313] FIGS. 14A and 14B are a series of graphs depicting the ability of masking moieties of the disclosure to reduce the ability of activatable anti-CD3ε antibodies comprising such masking moieties to bind to CD3ε on Jurkat T cells.

[0314] FIGS. 15A, 15B, 15C, and 15D are a series of graphs depicting that the CD3ε masking peptides shift the EC₅₀ of CD3ε binding in an EGFR masked, multispecific activatable antibody that utilize two versions of an SP34 scFv while retaining effective EGFR masking.

[0315] FIGS. 16A and 16B are a series of graphs depicting that the cytotoxicity EC₅₀ of CD3ε and EGFR masked multispecific, activatable antibodies are shifted relative to an unmasked control. This was evident with two versions of the SP34 scFv, namely the scFv in CI023 and CI024 versus the scFv in CI011 and CI010.

[0316] FIGS. 17A and 17B are a series of graphs depicting that in the context of a multi-specific, activatable antibody, the EGFR binding EC₅₀ is unaffected by the presence or absence of both CD3ε masks; likewise, CD3ε EC₅₀ is unaffected by the presence or absence of the EGFR mask.

[0317] FIGS. 18A and 18B are a series of graphs depicting that the largest shift in cytotoxicity EC₅₀ is obtained by masking both EGFR and CD3 binding. In addition, the cytotoxicity of the multispecific antibody and multispecific activatable antibodies is EGFR dependent.

[0318] FIG. 19 is a graph depicting that the largest shift in activation EC₅₀ is obtained by masking both EGFR and CD3 binding.

[0319] FIGS. 20A and 20B are a series of graphs depicting that CD3 masked multispecific antibodies show negligible target independent activation as evidenced by CD69+ frequency analysis shown in FIG. 20A and CD69 Mean Fluorescence Intensity analysis shown in FIG. 20B.

[0320] FIGS. 21A, 21B, 21C, and 21D are a series of graphs depicting that uPA activation restores binding of the multispecific, activatable CI011 (M-EGFR/M-hCD3) antibody. Cell killing of all multispecific, activatable antibodies is restored by uPA activation.

[0321] FIG. 22 is a graph depicting the ability of dually masked multispecific, activatable antibodies that contain different substrates to shift EC₅₀ cytotoxicity.

[0322] FIG. 23 is a graph depicting that bispecific antibody CI005 at 0.1 mg/kg dosed twice over 7 days and CI059 (BiTE) at 0.5 mg/kg/day for 8 days prevented the growth of HT-29Luc2 xenograft tumors.

[0323] FIG. 24 is a graph depicting that CI048 antibody limited establishment of HT-29Luc2 xenograft tumors and CI011 inhibited the growth of HT-29Luc2 xenograft tumors. The difference in effect between PBS and CI011 is significant (p<0.05).

[0324] FIG. 25 is a graph depicting that a dose-response for the CI048 bispecific antibody for elimination of HT-29Luc2 xenograft tumors.

[0325] FIG. 26 is a graph depicting that the CI048 bispecific antibody at 0.3 mg/kg eliminated HT-29Luc2 xenograft tumors and the CI040 bispecific activatable antibody at 0.1 mg/kg limited the growth of HT-29Luc2 xenograft tumors.

[0326] FIG. 27 is a graph depicting that the CI040 bispecific activatable antibody at 1.0 mg/kg and the CI048 bispecific antibody at 0.3 mg/kg eliminated HT-29Luc2 xenograft tumors.

[0327] FIG. 28 is a graph depicting that the CI011 bispecific activatable antibody at 1.0 mg/kg significantly inhibited the HT-29Luc2 xenograft tumor growth (p<0.05).

[0328] FIG. 29 is a graph depicting dose-response plots for CI048, CI011 and CI048 for serum alanine aminotransferase (ALT) concentration 48 hours post-dose.

[0329] FIG. 30 shows that mouse CD3ε masks incorporated into an EGFR masked, multispecific, activatable antibody shift the EC50 of binding to mouse CD3 while retaining effective EGFR masking.

[0330] FIG. 31 demonstrate that killing of IL6R+Molp-8 cells is maximally attenuated by masking both IL6R and CD3 binding.

### DETAILED DESCRIPTION

[0331] The present disclosure provides antibodies, activatable antibodies, multispecific antibodies and/or multispecific activatable antibodies that bind at least the epsilon chain of CD3 (CD3ε). As used herein, an activatable antibody is an antibody that includes a masking moiety (MM) linked to the antigen- or epitope-binding domain of the antibody such that coupling of the MM reduces the ability of the antigen- or epitope-binding domain to bind its target. As used herein, a multispecific antibody is an antibody that recognizes two or more different antigens or epitopes, and a multispecific activatable antibody is a multispecific antibody that includes at least one masking moiety (MM) linked to at least one antigen- or epitope-binding domain of the multispecific antibody such that coupling of the MM reduces the ability of the antigen- or epitope-binding domain to bind its target. The activatable antibodies and/or activatable multispecific antibodies provided herein are stable in circulation, activated at intended sites of therapy and/or diagnosis but not in normal, i.e., healthy tissue, and, when activated, exhibit binding to a target that is at least comparable to the corresponding, unmodified antibody or multispecific antibody.

[0332] The antibodies, activated activatable antibodies, multispecific antibodies and/or activated multispecific activatable antibodies of the present disclosure bind to CD3ε with a binding constant (K_{d}) of ≦1 μM, for example, in some embodiments, ≦100 nM, ≦10 nM, or ≦1 nM.

[0333] The anti-CD3ε antibodies, activatable antibodies, multispecific antibodies and/or multispecific activatable antibodies of the disclosure serve to activate T cells via engagement of CD3ε on the T cells. That is, such antibodies agonize, stimulate, activate, and/or augment CD3-mediated T cell activation. Biological activities of CD3 include, for example, T cell activation and other signaling through interaction between CD3 and the antigen-binding subunits of the T-Cell Receptor (TCR). For example, the anti-CD3ε antibodies, activated activatable antibodies, multispecific antibodies and/or activated multispecific activatable antibodies completely or partially activate T cells via engagement of CD3ε on T cells by partially or completely modulating, e.g., agonizing, stimulating, activating or otherwise augmenting CD3-mediated T cell activation.

[0334] Non-limiting examples of multispecific antibodies include bispecific antibodies, trispecific antibodies, tetraspecific antibodies, and other multispecific antibodies. Multispecific antibodies provided herein are also multivalent; as used herein, multivalency refers to the total number of binding sites on the antibody, regardless of whether the binding sites recognize the same or different antigens or epitopes. Non-limiting examples of multispecific activatable antibodies include bispecific activatable antibodies, trispecific activatable antibodies, tetraspecific activatable antibodies, and other multispecific activatable antibodies. Multispecific activatable antibodies provided herein are also multivalent.

[0335] In some embodiments, the multispecific antibodies or fragments thereof and/or multispecific activatable antibodies or fragments thereof are designed to engage T cells and/or other immune effector cells. Multispecific activatable antibodies or fragments thereof that engage T cells are also referred to herein as T-cell engaging multispecific antibodies or fragments thereof and/or T-cell engaging multispecific activatable antibodies or fragments thereof. Multispecific activatable antibodies or fragments thereof that engage immune effector cells are also referred to herein as immune effector cell engaging multispecific antibodies or fragments thereof and/or immune effector cell engaging multispecific activatable antibodies or fragments thereof. In some embodiments, the multispecific antibodies or fragments thereof and/or multispecific activatable antibodies or fragments thereof are designed to bind or otherwise interact with more than one target and/or more than one epitope, also referred to herein as multi-antigen targeting antibodies or fragments thereof and/or multi-antigen targeting activatable antibodies or fragments thereof.

[0336] In some embodiments, a multispecific antibody or fragment thereof includes an IgG domain and a scFv domain. In some embodiments, a multispecific antibody or fragment thereof includes an IgG variable domain and a scFv domain. In some embodiments, one antibody domain of a multispecific antibody or fragment thereof has specificity for a target antigen and another antibody domain has specificity for a T-cell surface antigen. In some embodiments, one antibody domain of a multispecific antibody or fragment thereof has specificity for a target antigen and another antibody domain has specificity for another target antigen. In some embodiments, one antibody domain of a multispecific antibody or fragment thereof has specificity for an epitope of a target antigen and another antibody domain has specificity for another epitope of the same target antigen.

[0337] In some embodiments, the multispecific activatable antibodies are engineered to include a masking moiety (MM) that is coupled to an antibody or antigen-binding fragment thereof (AB) via a non-cleavable linker. For example, in some embodiments, the multispecific activatable antibody is a T-cell engaging multispecific activatable antibody that includes a targeting antibody or antigen-binding fragment thereof and a T-cell engaging antibody or antigen-binding portion thereof, where the T-cell engaging antibody or antigen-binding fragment thereof includes a first antibody or antigen-binding fragment thereof (AB1) that binds a first, T-cell engaging target, where the AB1 is attached via non-cleavable linker to a masking moiety (MM1) such that coupling of the MM reduces the ability of the AB1 to bind the first target, and the targeting antibody or antigen-binding fragment thereof includes a second antibody or antigen-binding fragment thereof (AB2) that binds a second target, where the AB2 is attached via a cleavable linker to a masking moiety (MM2) such that coupling of the MM reduces the ability of the AB2 to bind the second target.

[0338] In some embodiments, the multispecific activatable antibody is a T-cell engaging multispecific activatable antibody that includes a targeting antibody or antigen-binding fragment thereof and a T-cell engaging antibody or antigen-binding portion thereof, where the T-cell engaging antibody or antigen-binding fragment thereof includes a first antibody or antigen-binding fragment thereof (AB1) that binds a first, T-cell engaging target, where the AB1 is attached via non-cleavable linker to a masking moiety (MM1) such that coupling of the MM reduces the ability of the AB1 to bind the first target, and the targeting antibody or antigen-binding fragment thereof is unmasked.

### DEFINITIONS

[0339] Unless otherwise defined, scientific and technical terms used in connection with the present disclosure shall have the meanings that are commonly understood by those of ordinary skill in the art. The term “a” entity or “an” entity refers to one or more of that entity. For example, a compound refers to one or more compounds. As such, the terms “a”, “an”, “one or more” and “at least one” can be used interchangeably. Further, unless otherwise required by context, singular terms shall include pluralities and plural terms shall include the singular. Generally, nomenclatures utilized in connection with, and techniques of, cell and tissue culture, molecular biology, and protein and oligo- or polynucleotide chemistry and hybridization described herein are those well-known and commonly used in the art. Standard techniques are used for recombinant DNA, oligonucleotide synthesis, and tissue culture and transformation (e.g., electroporation, lipofection). Enzymatic reactions and purification techniques are performed according to manufacturer's specifications or as commonly accomplished in the art or as described herein. The foregoing techniques and procedures are generally performed according to conventional methods well known in the art and as described in various general and more specific references that are cited and discussed throughout the present specification. See e.g., Sambrook et al. Molecular Cloning: A Laboratory Manual (2d ed., Cold Spring Harbor Laboratory Press, Cold Spring Harbor, N.Y. (1989)). The nomenclatures utilized in connection with, and the laboratory procedures and techniques of, analytical chemistry, synthetic organic chemistry, and medicinal and pharmaceutical chemistry described herein are those well-known and commonly used in the art. Standard techniques are used for chemical syntheses, chemical analyses, pharmaceutical preparation, formulation, and delivery, and treatment of patients.

[0340] As utilized in accordance with the present disclosure, the following terms, unless otherwise indicated, shall be understood to have the following meanings:

[0341] As used herein, the term “antibody” refers to immunoglobulin molecules and antigen-binding portions of immunoglobulin (Ig) molecules, i.e., molecules that contain an antigen binding site that specifically binds (immunoreacts with) an antigen. By “specifically bind” or “immunoreacts with” or “immunospecifically bind” is meant that the antibody reacts with one or more antigenic determinants of the desired antigen and does not react with other polypeptides or binds at much lower affinity (K_{d}>10⁻⁶). Antibodies include, but are not limited to, polyclonal, monoclonal, chimeric, fully human, domain antibody, single chain, Fab, and F(ab′)₂ fragments, scFvs, and an Fab expression library.

[0342] The basic antibody structural unit is known to comprise a tetramer. Each tetramer is composed of two identical pairs of polypeptide chains, each pair having one “light” (about 25 kDa) and one “heavy” chain (about 50-70 kDa). The amino-terminal portion of each chain includes a variable region of about 100 to 110 or more amino acids primarily responsible for antigen recognition. The carboxy-terminal portion of each chain defines a constant region primarily responsible for effector function. In general, antibody molecules obtained from humans relate to any of the classes IgG, IgM, IgA, IgE and IgD, which differ from one another by the nature of the heavy chain present in the molecule. Certain classes have subclasses as well, such as IgG₁, IgG₂, IgG₃, IgG₄, and others. Furthermore, in humans, the light chain may be a kappa chain or a lambda chain.

[0343] The term “monoclonal antibody” (mAb) or “monoclonal antibody composition”, as used herein, refers to a population of antibody molecules that contain only one molecular species of antibody molecule consisting of a unique light chain gene product and a unique heavy chain gene product. In particular, the complementarity determining regions (CDRs) of the monoclonal antibody are identical in all the molecules of the population. MAbs contain an antigen binding site capable of immunoreacting with a particular epitope of the antigen characterized by a unique binding affinity for it.

[0344] The term “antigen-binding site” or “binding portion” refers to the part of the immunoglobulin molecule that participates in antigen binding. The antigen binding site is formed by amino acid residues of the N-terminal variable (“V”) regions of the heavy (“H”) and light (“L”) chains. Three highly divergent stretches within the V regions of the heavy and light chains, referred to as “hypervariable regions,” are interposed between more conserved flanking stretches known as “framework regions,” or “FRs”. Thus, the term “FR” refers to amino acid sequences that are naturally found between, and adjacent to, hypervariable regions in immunoglobulins. In an antibody molecule, the three hypervariable regions of a light chain and the three hypervariable regions of a heavy chain are disposed relative to each other in three dimensional space to form an antigen-binding surface. The antigen-binding surface is complementary to the three-dimensional surface of a bound antigen, and the three hypervariable regions of each of the heavy and light chains are referred to as “complementarity-determining regions,” or “CDRs.” The assignment of amino acids to each domain is in accordance with the definitions of Kabat Sequences of Proteins of Immunological Interest (National Institutes of Health, Bethesda, Md. (1987 and 1991)), or Chothia & Lesk J. Mol. Biol. 196:901-917 (1987), Chothia et al. Nature 342:878-883 (1989).

[0345] As used herein, the term “epitope” includes any protein determinant capable of specific binding to an immunoglobulin, an scFv, or a T-cell receptor. The term “epitope” includes any protein determinant capable of specific binding to an immunoglobulin or T-cell receptor. Epitopic determinants usually consist of chemically active surface groupings of molecules such as amino acids or sugar side chains and usually have specific three dimensional structural characteristics, as well as specific charge characteristics. For example, antibodies may be raised against N-terminal or C-terminal peptides of a polypeptide. An antibody is said to specifically bind an antigen when the dissociation constant is ≦1 μM; for example, in some embodiments ≦100 nM and in some embodiments, ≦10 nM.

[0346] As used herein, the terms “specific binding,” “immunological binding,” and “immunological binding properties” refer to the non-covalent interactions of the type that occur between an immunoglobulin molecule and an antigen for which the immunoglobulin is specific. The strength, or affinity of immunological binding interactions can be expressed in terms of the dissociation constant (KO of the interaction, wherein a smaller K_{d} represents a greater affinity. Immunological binding properties of selected polypeptides can be quantified using methods well known in the art. One such method entails measuring the rates of antigen-binding site/antigen complex formation and dissociation, wherein those rates depend on the concentrations of the complex partners, the affinity of the interaction, and geometric parameters that equally influence the rate in both directions. Thus, both the “on rate constant” (Kₒₙ) and the “off rate constant” (K_{off}) can be determined by calculation of the concentrations and the actual rates of association and dissociation. (See Nature 361:186-87 (1993)). The ratio of K_{off}/Kₒₙ enables the cancellation of all parameters not related to affinity, and is equal to the dissociation constant K_{d}. (See, generally, Davies et al. (1990) Annual Rev Biochem 59:439-473). An antibody of the present disclosure is said to specifically bind to EGFR, when the binding constant (K_{d}) is ≦1 μM, for example in some embodiments ≦100 nM, in some embodiments ≦10 nM, and in some embodiments ≦100 pM to about 1 pM, as measured by assays such as radioligand binding assays or similar assays known to those skilled in the art.

[0347] The term “isolated polynucleotide” as used herein shall mean a polynucleotide of genomic, cDNA, or synthetic origin or some combination thereof, which by virtue of its origin the “isolated polynucleotide” (1) is not associated with all or a portion of a polynucleotide in which the “isolated polynucleotide” is found in nature, (2) is operably linked to a polynucleotide that it is not linked to in nature, or (3) does not occur in nature as part of a larger sequence. Polynucleotides in accordance with the disclosure include the nucleic acid molecules encoding the heavy chain immunoglobulin molecules shown herein, and nucleic acid molecules encoding the light chain immunoglobulin molecules shown herein.

[0348] The term “isolated protein” referred to herein means a protein of cDNA, recombinant RNA, or synthetic origin or some combination thereof, which by virtue of its origin, or source of derivation, the “isolated protein” (1) is not associated with proteins found in nature, (2) is free of other proteins from the same source, e.g., free of murine proteins, (3) is expressed by a cell from a different species, or (4) does not occur in nature.

[0349] The term “polypeptide” is used herein as a generic term to refer to native protein, fragments, or analogs of a polypeptide sequence. Hence, native protein fragments, and analogs are species of the polypeptide genus. Polypeptides in accordance with the disclosure comprise the heavy chain immunoglobulin molecules shown herein, and the light chain immunoglobulin molecules shown herein, as well as antibody molecules formed by combinations comprising the heavy chain immunoglobulin molecules with light chain immunoglobulin molecules, such as kappa light chain immunoglobulin molecules, and vice versa, as well as fragments and analogs thereof.

[0350] The term “naturally-occurring” as used herein as applied to an object refers to the fact that an object can be found in nature. For example, a polypeptide or polynucleotide sequence that is present in an organism (including viruses) that can be isolated from a source in nature and that has not been intentionally modified by man in the laboratory or otherwise is naturally-occurring.

[0351] The term “operably linked” as used herein refers to positions of components so described are in a relationship permitting them to function in their intended manner. A control sequence “operably linked” to a coding sequence is ligated in such a way that expression of the coding sequence is achieved under conditions compatible with the control sequences.

[0352] The term “control sequence” as used herein refers to polynucleotide sequences that are necessary to effect the expression and processing of coding sequences to which they are ligated. The nature of such control sequences differs depending upon the host organism in prokaryotes, such control sequences generally include promoter, ribosomal binding site, and transcription termination sequence in eukaryotes, generally, such control sequences include promoters and transcription termination sequence. The term “control sequences” is intended to include, at a minimum, all components whose presence is essential for expression and processing, and can also include additional components whose presence is advantageous, for example, leader sequences and fusion partner sequences. The term “polynucleotide” as referred to herein means nucleotides of at least 10 bases in length, either ribonucleotides or deoxynucleotides or a modified form of either type of nucleotide. The term includes single and double stranded forms of DNA.

[0353] The term oligonucleotide referred to herein includes naturally occurring, and modified nucleotides linked together by naturally occurring, and non-naturally occurring oligonucleotide linkages. Oligonucleotides are a polynucleotide subset generally comprising a length of 200 bases or fewer. In some embodiments, oligonucleotides are 10 to 60 bases in length, for example in some embodiments, 12, 13, 14, 15, 16, 17, 18, 19, or 20 to 40 bases in length. Oligonucleotides are usually single stranded, e.g., for probes, although oligonucleotides may be double stranded, e.g., for use in the construction of a gene mutant. Oligonucleotides of the disclosure are either sense or antisense oligonucleotides.

[0354] The term “naturally occurring nucleotides” referred to herein includes deoxyribonucleotides and ribonucleotides. The term “modified nucleotides” referred to herein includes nucleotides with modified or substituted sugar groups and the like. The term “oligonucleotide linkages” referred to herein includes oligonucleotide linkages such as phosphorothioate, phosphorodithioate, phosphoroselerloate, phosphorodiselenoate, phosphoroanilothioate, phoshoraniladate, phosphoronmidate, and the like. See e.g., LaPlanche et al. Nucl. Acids Res. 14:9081 (1986); Stec et al. J. Am. Chem. Soc. 106:6077 (1984), Stein et al. Nucl. Acids Res. 16:3209 (1988), Zon et al. Anti Cancer Drug Design 6:539 (1991); Zon et al. Oligonucleotides and Analogues: A Practical Approach, pp. 87-108 (F. Eckstein, Ed., Oxford University Press, Oxford England (1991)); Stec et al. U.S. Pat. No. 5,151,510; Uhlmann and Peyman Chemical Reviews 90:543 (1990). An oligonucleotide can include a label for detection, if desired.

[0355] As used herein, the twenty conventional amino acids and their abbreviations follow conventional usage. See Immunology—A Synthesis (2nd Edition, E. S. Golub and D. R. Gren, Eds., Sinauer Associates, Sunderland7 Mass. (1991)). Stereoisomers (e.g., D-amino acids) of the twenty conventional amino acids, unnatural amino acids such as α-, α-disubstituted amino acids, N-alkyl amino acids, lactic acid, and other unconventional amino acids may also be suitable components for polypeptides of the present disclosure. Examples of unconventional amino acids include: 4 hydroxyproline, γ-carboxyglutamate, δ-N,N,N-trimethyllysine, δ-N-acetyllysine, O-phosphoserine, N-acetylserine, N-formylmethionine, 3-methylhistidine, 5-hydroxylysine, σ-N-methylarginine, and other similar amino acids and imino acids (e.g., 4-hydroxyproline). In the polypeptide notation used herein, the left-hand direction is the amino terminal direction and the right-hand direction is the carboxy-terminal direction, in accordance with standard usage and convention.

[0356] Similarly, unless specified otherwise, the left-hand end of single-stranded polynucleotide sequences is the 5′ end the left-hand direction of double-stranded polynucleotide sequences is referred to as the 5′ direction. The direction of 5′ to 3′ addition of nascent RNA transcripts is referred to as the transcription direction sequence regions on the DNA strand having the same sequence as the RNA and that are 5′ to the 5′ end of the RNA transcript are referred to as “upstream sequences”, sequence regions on the DNA strand having the same sequence as the RNA and that are 3′ to the 3′ end of the RNA transcript are referred to as “downstream sequences”.

[0357] As applied to polypeptides, the term “substantial identity” means that two peptide sequences, when optimally aligned, such as by the programs GAP or BESTFIT using default gap weights, share at least 80 percent sequence identity, for example in some embodiments, at least 90 percent sequence identity, in some embodiments at least 95 percent sequence identity, and in some embodiments at least 99 percent sequence identity.

[0358] In some embodiments, residue positions that are not identical differ by conservative amino acid substitutions.

[0359] As discussed herein, minor variations in the amino acid sequences of antibodies or immunoglobulin molecules are contemplated as being encompassed by the present disclosure, providing that the variations in the amino acid sequence maintain at least 75%, for example in some embodiments at least 80%, 90%, 95%, and in some embodiments 99%. In particular, conservative amino acid replacements are contemplated. Conservative replacements are those that take place within a family of amino acids that are related in their side chains. Genetically encoded amino acids are generally divided into families: (1) acidic amino acids are aspartate, glutamate; (2) basic amino acids are lysine, arginine, histidine; (3) non-polar amino acids are alanine, valine, leucine, isoleucine, proline, phenylalanine, methionine, tryptophan, and (4) uncharged polar amino acids are glycine, asparagine, glutamine, cysteine, serine, threonine, tyrosine. The hydrophilic amino acids include arginine, asparagine, aspartate, glutamine, glutamate, histidine, lysine, serine, and threonine. The hydrophobic amino acids include alanine, cysteine, isoleucine, leucine, methionine, phenylalanine, proline, tryptophan, tyrosine and valine. Other families of amino acids include (i) serine and threonine, which are the aliphatic-hydroxy family; (ii) asparagine and glutamine, which are the amide containing family; (iii) alanine, valine, leucine and isoleucine, which are the aliphatic family; and (iv) phenylalanine, tryptophan, and tyrosine, which are the aromatic family. For example, it is reasonable to expect that an isolated replacement of a leucine with an isoleucine or valine, an aspartate with a glutamate, a threonine with a serine, or a similar replacement of an amino acid with a structurally related amino acid will not have a major effect on the binding or properties of the resulting molecule, especially if the replacement does not involve an amino acid within a framework site. Whether an amino acid change results in a functional peptide can readily be determined by assaying the specific activity of the polypeptide derivative. Assays are described in detail herein. Fragments or analogs of antibodies or immunoglobulin molecules can be readily prepared by those of ordinary skill in the art. In some embodiments, amino- and carboxy-termini of fragments or analogs occur near boundaries of functional domains. Structural and functional domains can be identified by comparison of the nucleotide and/or amino acid sequence data to public or proprietary sequence databases. Computerized comparison methods are used to identify sequence motifs or predicted protein conformation domains that occur in other proteins of known structure and/or function. Methods to identify protein sequences that fold into a known three-dimensional structure are known. Bowie et al. Science 253:164 (1991). Thus, the foregoing examples demonstrate that those of skill in the art can recognize sequence motifs and structural conformations that may be used to define structural and functional domains in accordance with the disclosure.

[0360] In some embodiments, amino acid substitutions are those that: (1) reduce susceptibility to proteolysis, (2) reduce susceptibility to oxidation, (3) alter binding affinity for forming protein complexes, (4) alter binding affinities, and (4) confer or modify other physicochemical or functional properties of such analogs. Analogs can include various muteins of a sequence other than the naturally-occurring peptide sequence. For example, single or multiple amino acid substitutions (for example, conservative amino acid substitutions) may be made in the naturally-occurring sequence (for example, in the portion of the polypeptide outside the domain(s) forming intermolecular contacts. A conservative amino acid substitution should not substantially change the structural characteristics of the parent sequence (e.g., a replacement amino acid should not tend to break a helix that occurs in the parent sequence, or disrupt other types of secondary structure that characterizes the parent sequence). Examples of art-recognized polypeptide secondary and tertiary structures are described in Proteins, Structures and Molecular Principles (Creighton, Ed., W. H. Freeman and Company, New York (1984)); Introduction to Protein Structure (C. Branden and J. Tooze, eds., Garland Publishing, New York, N.Y. (1991)); and Thornton et at. Nature 354:105 (1991).

[0361] The term “polypeptide fragment” as used herein refers to a polypeptide that has an amino terminal and/or carboxy-terminal deletion and/or one or more internal deletion(s), but where the remaining amino acid sequence is identical to the corresponding positions in the naturally-occurring sequence deduced, for example, from a full length cDNA sequence. Fragments typically are at least 5, 6, 8 or 10 amino acids long, for example in some embodiments at least 14 amino acids long, in some embodiments at least 20 amino acids long, usually at least 50 amino acids long, and in some embodiments at least 70 amino acids long. The term “analog” as used herein refers to polypeptides that are comprised of a segment of at least 25 amino acids that has substantial identity to a portion of a deduced amino acid sequence and that has specific binding to EGFR, under suitable binding conditions. Typically, polypeptide analogs comprise a conservative amino acid substitution (or addition or deletion) with respect to the naturally-occurring sequence. Analogs typically are at least 20 amino acids long, for example in some embodiments at least 50 amino acids long or longer, and can often be as long as a full-length naturally-occurring polypeptide.

[0362] The term “agent” is used herein to denote a chemical compound, a mixture of chemical compounds, a biological macromolecule, or an extract made from biological materials.

[0363] As used herein, the terms “label” or “labeled” refers to incorporation of a detectable marker, e.g., by incorporation of a radiolabeled amino acid or attachment to a polypeptide of biotinyl moieties that can be detected by marked avidin (e.g., streptavidin containing a fluorescent marker or enzymatic activity that can be detected by optical or calorimetric methods). In certain situations, the label or marker can also be therapeutic. Various methods of labeling polypeptides and glycoproteins are known in the art and may be used. Examples of labels for polypeptides include, but are not limited to, the following: radioisotopes or radionuclides (e.g., ³H, ¹⁴C, ¹⁵N, ³⁵S, ⁹⁰Y, ⁹⁹Tc, ¹¹¹In, ¹²⁵I, ¹³¹I), fluorescent labels (e.g., a fluorophore, rhodamine, lanthanide phosphors), enzymatic labels (e.g., horseradish peroxidase, p-galactosidase, luciferase, alkaline phosphatase), chemiluminescent, biotinyl groups, predetermined polypeptide epitopes recognized by a secondary reporter (e.g., leucine zipper pair sequences, binding sites for secondary antibodies, metal binding domains, epitope tags). In some embodiments, labels are attached by spacer arms of various lengths to reduce potential steric hindrance. The term “pharmaceutical agent or drug” as used herein refers to a chemical compound or composition capable of inducing a desired therapeutic effect when properly administered to a patient.

[0364] As used herein, “substantially pure” means an object species is the predominant species present (i.e., on a molar basis it is more abundant than any other individual species in the composition), and a substantially purified fraction is a composition wherein the object species comprises at least about 50 percent (on a molar basis) of all macromolecular species present.

[0365] Generally, a substantially pure composition will comprise more than about 80 percent of all macromolecular species present in the composition, for example, in some embodiments, more than about 85%, 90%, 95%, and 99%. In some embodiments, the object species is purified to essential homogeneity (contaminant species cannot be detected in the composition by conventional detection methods) wherein the composition consists essentially of a single macromolecular species.

[0366] The term patient includes human and veterinary subjects.

[0367] Other chemistry terms herein are used according to conventional usage in the art, as exemplified by The McGraw-Hill Dictionary of Chemical Terms (Parker, S., Ed., McGraw-Hill, San Francisco (1985)).

### Multispecific Antibodies and Multispecific Activatable Antibodies

[0368] Exemplary multispecific antibodies and/or multispecific activatable antibodies of the disclosure include, for example, those shown in the Examples provided herein, and variants thereof.

[0369] In some non-limiting embodiments, at least one of the AB in the multispecific antibody is specific for CD3ε and at least one other AB is a binding partner for any target listed in Table 1.

TABLE 1
Exemplary Targets

| | | | | | |
|---|---|---|---|---|---|
| 1-92-LFA-3 | CD52 | DL44 | HVEM | LAG-3 | STEAP1 |
| Alpha-4 | CD56 | DLK1 | Hyaluronidase | LIF-R | STEAP2 |
| integrin | | | | | |
| Alpha-V | CD64 | DLL4 | ICOS | Lewis X | TAG-72 |
| integrin | | | | | |
| alpha4beta1 | CD70 | DPP-4 | IFNalpha | LIGHT | TAPA1 |
| integrin | | | | | |
| alpha4beta7 | CD71 | DSG1 | IFNbeta | LRP4 | TGFbeta |
| integrin | | | | | |
| AGR2 | CD74 | EGFR | IFNgamma | LRRC26 | TIGIT |
| Anti-Lewis-Y | | EGFRviii | IgE | MCSP | TIM-3 |
| Apelin J | CD80 | Endothelin B | IgE Receptor | Mesothelin | TLR2 |
| receptor | | receptor | (FceRI) | | |
| | | (ETBR) | | | |
| APRIL | CD81 | ENPP3 | IGF | MRP4 | TLR4 |
| B7-H4 | CD86 | EpCAM | IGF1R | MUC1 | TLR6 |
| BAFF | CD95 | EPHA2 | IL1B | Mucin-16 | TLR7 |
| | | | | (MUC16, | |
| | | | | CA-125) | |
| BTLA | CD117 | EPHB2 | IL1R | Na/K ATPase | TLR8 |
| C5 | CD125 | ERBB3 | IL2 | Neutrophil | TLR9 |
| complement | | | | elastase | |
| C-242 | CD132 | F protein of | IL11 | NGF | TMEM31 |
| | (IL-2RG) | RSV | | | |
| CA9 | CD133 | FAP | IL12 | Nicastrin | TNFalpha |
| CA19-9 | CD137 | FGF-2 | IL12p40 | Notch | TNFR |
| (Lewis a) | | | | Receptors | |
| Carbonic | CD138 | FGF8 | IL-12R, | Notch 1 | TNFRS12A |
| anhydrase 9 | | | IL-12Rbeta1 | | |
| CD2 | CD166 | FGFR1 | IL13 | Notch 2 | TRAIL-R1 |
| CD3 | CD172A | FGFR2 | IL13R | Notch 3 | TRAIL-R2 |
| CD6 | CD248 | FGFR3 | IL15 | Notch 4 | Transferrin |
| CD9 | CDH6 | FGFR4 | IL17 | NOV | Transferrin |
| | | | | | receptor |
| CD11a | CEACAM5 | Folate | IL18 | OSM-R | TRK-A |
| | (CEA) | receptor | | | |
| CD19 | CEACAM6 | GAL3ST1 | IL21 | OX-40 | TRK-B |
| | (NCA-90) | | | | |
| CD20 | CLAUDIN-3 | G-CSF | IL23 | PAR2 | uPAR |
| CD22 | CLAUDIN-4 | G-CSFR | IL23R | PDGF-AA | VAP1 |
| CD24 | cMet | GD2 | IL27/IL27R | PDGF-BB | VCAM-1 |
| | | | (wsx1) | | |
| CD25 | Collagen | GITR | IL29 | PDGFRalpha | VEGF |
| CD27 | Cripto | GLUT1 | IL-31R | PDGFRbeta | VEGF-A |
| CD28 | CSFR | GLUT4 | IL31/IL31R | PD-1 | VEGF-B |
| CD30 | CSFR-1 | GM-CSF | IL2R | PD-L1 | VEGF-C |
| CD33 | CTLA-4 | GM-CSFR | IL4 | PD-L2 | VEGF-D |
| CD38 | CTGF | GP IIb/IIIa | IL4R | Phosphatidyl- | VEGFR1 |
| | | receptors | | serine | |
| CD40 | CXCL10 | Gp130 | IL6, IL6R | P1GF | VEGFR2 |
| CD40 | CXCL13 | GPIIB/IIIA | Insulin | PSCA | VEGFR3 |
| | | | Receptor | | |
| CD41 | CXCR1 | GPNMB | Jagged | PSMA | VISTA |
| | | | Ligands | | |
| CD44 | CXCR2 | GRP78 | Jagged 1 | RAAG12 | WISP-1 |
| CD44v6 | | HER2/neu | Jagged 2 | RAGE | WISP-2 |
| CD47 | CXCR4 | HGF | | SLC44A4 | WISP-3 |
| CD51 | CYR61 | hGH | | Sphingosine 1 | |
| | | | | Phosphate | |

[0370] In some non-limiting embodiments, at least one of the AB of the multispecific antibody is or is derived from a sequence set forth in the Examples provided herein.

[0371] In some non-limiting embodiments, at least one of the AB of the multispecific antibody is or is derived from an antibody listed in Table 2.

TABLE 2
Exemplary sources for ABs

| Antibody Trade Name (antibody name) | Target |
|---|---|
| Avastin ™ (bevacizumab) | VEGF |
| Lucentis ™ (ranibizumab) | VEGF |
| Erbitux ™ (cetuximab) | EGFR |
| Vectibix ™ (panitumumab) | EGFR |
| Remicade ™ (infliximab) | TNFα |
| Humira ™ (adalimumab) | TNFα |
| Tysabri ™ (natalizumab) | Integrinα4 |
| Simulect ™ (basiliximab) | IL2R |
| Soliris ™ (eculizumab) | Complement C5 |
| Raptiva ™ (efalizumab) | CD11a |
| Bexxar ™ (tositumomab) | CD20 |
| Zevalin ™ (ibritumomab tiuxetan) | CD20 |
| Rituxan ™ (rituximab) | CD20 |
| Ocrelizumab | CD20 |
| Arzerra ™ (ofatumumab) | CD20 |
| Obinutuzumab | CD20 |
| Zenapax ™ (daclizumab) | CD25 |
| Adcetris ™ (brentuximab vedotin) | CD30 |
| Myelotarg ™ (gemtuzumab) | CD33 |
| Mylotarg ™ (gemtuzumab ozogamicin) | CD33 |
| Campath ™ (alemtuzumab) | CD52 |
| ReoPro ™ (abiciximab) | Glycoprotein receptor IIb/IIIa |
| Xolair ™ (omalizumab) | IgE |
| Herceptin ™ (trastuzumab) | Her2 |
| Kadcyla ™ (trastuzumab emtansine) | Her2 |
| Synagis ™ (palivizumab) | F protein of RSV |
| Yervoy ™ (ipilimumab) | CTLA-4 |
| (tremelimumab) | CTLA-4 |
| Hu5c8 | CD40L |
| (pertuzumab) | Her2-neu |
| (ertumaxomab) | CD3/Her2-neu |
| Orencia ™ (abatacept) | CTLA-4 |
| (tanezumab) | NGF |
| (bavituximab) | Phosphatidylserine |
| (zalutumumab) | EGFR |
| (mapatumumab) | EGFR |
| (matuzumab) | EGFR |
| (nimotuzumab) | EGFR |
| ICR62 | EGFR |
| mAb 528 | EGFR |
| CH806 | EGFR |
| MDX-447 | EGFR/CD64 |
| (edrecolomab) | EpCAM |
| RAV12 | RAAG12 |
| huJ591 | PSMA |
| Enbrel ™ (etanercept) | TNF-R |
| Amevive ™ (alefacept) | 1-92-LFA-3 |
| Antril ™, Kineret ™ (ankinra) | IL-1Ra |
| GC1008 | TGFbeta |
| | Notch, e.g., Notch 1 |
| | Jagged 1 or Jagged 2 |
| (adecatumumab) | EpCAM |
| (figitumumab) | IGF1R |
| (tocilizumab) | IL-6 receptor |
| Stelara ™ (ustekinumab) | IL-12/IL-23 |
| Prolia ™ (denosumab) | RANKL |
| Keytruda (Pembrolizumab) | PD-1 |
| Opdivo (Nivolumab) | PD-1 |
| Atezolizumab (MPDL3280A) | PD-L1 |

[0372] Exemplary antibodies, activatable antibodies and antigen-binding fragments thereof that bind CD3ε of the disclosure include the CD3ε binding sequences described in the Examples, for example in Examples 2 and 4. Exemplary multispecific antibodies and multispecific activatable antibodies include the multispecific antibodies and multispecific activatable antibodies described in the Examples, for example in Example 4.

[0373] In some embodiments, the multispecific activatable antibody includes a heavy chain sequence selected from the group consisting of SEQ ID NOs: 446, 452, 454, 456, 460, 462, 464, 466, 470, 472, 476, 478, 480, 486, 488, 490, 492, 494, 496, 498, 500, 502, 504, 510, 512, 514, 518, 524, 526, 530, 532, 534, 536, 538, 540, 542, 544, and 546.

[0374] In some embodiments, the multispecific activatable antibody includes a light chain sequence selected from the group consisting of SEQ ID NOs: 448, 450, 458, 468, 474, 482, 484, 508, 516, and 520.

[0375] In some embodiments, the multispecific activatable antibody includes a heavy chain sequence selected from the group consisting of SEQ ID NOs: 446, 452, 454, 456, 460, 462, 464, 466, 470, 472, 476, 478, 480, 486, 488, 490, 492, 494, 496, 498, 500, 502, 504, 510, 512, 514, 518, 524, 526, 530, 532, 534, 536, 538, 540, 542, 544, and 546; and a light chain sequence selected from the group consisting of SEQ ID NOs: 448, 450, 458, 468, 474, 482, 484, 508, 516, and 520.

[0376] In some embodiments, the multispecific activatable antibody includes a heavy chain sequence that is at least 90%, 91%, 92%, 93%, 94%, 95%, 96%, 97%, 98% or 99% identical to an amino acid sequence selected from the group consisting of SEQ ID NOs: 446, 452, 454, 456, 460, 462, 464, 466, 470, 472, 476, 478, 480, 486, 488, 490, 492, 494, 496, 498, 500, 502, 504, 510, 512, 514, 518, 524, 526, 530, 532, 534, 536, 538, 540, 542, 544, and 546.

[0377] In some embodiments, the multispecific activatable antibody includes a light chain sequence that is at least 90%, 91%, 92%, 93%, 94%, 95%, 96%, 97%, 98% or 99% identical to an amino acid sequence selected from the group consisting of SEQ ID NOs: 448, 450, 458, 468, 474, 482, 484, 508, 516, and 520.

[0378] In some embodiments, the multispecific activatable antibody includes a heavy chain sequence that is at least 90%, 91%, 92%, 93%, 94%, 95%, 96%, 97%, 98% or 99% identical to an amino acid sequence selected from the group consisting of SEQ ID NOs: 446, 452, 454, 456, 460, 462, 464, 466, 470, 472, 476, 478, 480, 486, 488, 490, 492, 494, 496, 498, 500, 502, 504, 510, 512, 514, 518, 524, 526, 530, 532, 534, 536, 538, 540, 542, 544, and 546; and a light chain sequence that is at least 90%, 91%, 92%, 93%, 94%, 95%, 96%, 97%, 98% or 99% identical to an amino acid sequence selected from the group consisting of SEQ ID NOs: 448, 450, 458, 468, 474, 482, 484, 508, 516, and 520.

[0379] In some embodiments, the multispecific activatable antibody includes the amino acid sequence of SEQ ID NO: 506. In some embodiments, the multispecific activatable antibody includes an amino acid sequence that is at least 90%, 91%, 92%, 93%, 94%, 95%, 96%, 97%, 98% or 99% identical to the amino acid sequence of SEQ ID NO: 506.

[0380] Exemplary ABs that bind CD3ε of the disclosure include the CD3ε binding sequences shown below:

CD3HvLv
(SEQ ID NO: 587)
EVQLVESGGGLVQPGGSLKLSCAASGFTFNKYAMNWVRQAPGKGLEWVAR
IRSKYNNYATYYADSVKDRFTISRDDSKNTAYLQMNNLKTEDTAVYYCVR
HGNFGNSYISYWAYWGQGTLVTVSSGGGGSGGGGSGGGGSQTVVTQEPSL
TVSPGGTVTLTCGSSTGAVTSGYYPNWVQQKPGQAPRGLIGGTKFLAPGT
PARFSGSLLGGKAALTLSGVQPEDEAEYYCALWYSNRWVFGGGTKLTVL
CD3HvLv
(SEQ ID NO: 588)
QTVVTQEPSLTVSPGGTVTLTCRSSTGAVTTSNYANWVQQKPGQAPRGLI
GGTNKRAPGTPARFSGSLLGGKAALTLSGVQPEDEAEYYCALWYSNLWVF
GGGTKLTVLGGGGSGGGGSGGGGSEVQLVESGGGLVQPGGSLKLSCAASG
FTFNTYAMNWVRQAPGKGLEWVARIRSKYNNYATYYADSVKDRFTISRDD
SKNTAYLQMNNLKTEDTAVYYCVRHGNFGNSYVSWFAYWGQGTLVTVSS

[0381] In some embodiments, the activatable anti-CD3ε antibody includes a heavy chain that comprises or is derived from a heavy chain amino acid sequence shown in Table 17. In some embodiments, the activatable anti-CD3ε antibody includes a light chain that comprises or is derived from a light chain amino acid sequence shown in Table 17. In some embodiments, the activatable anti-CD3ε antibody includes a heavy chain that comprises or is derived from a heavy chain amino acid sequence shown in Table 17, and a light chain that comprises or is derived from a light chain amino acid sequence shown in Table 17. In some embodiments, the activatable anti-CD3ε antibody includes a combination of a heavy chain variable region sequence and a light chain variable region sequence from the combinations shown in Group A in Table 17. In some embodiments, the activatable anti-CD3ε antibody includes a combination of a heavy chain variable region sequence and a light chain variable region sequence from the combinations shown in Group B in Table 17. In some embodiments, the activatable anti-CD3ε antibody includes a combination of a heavy chain variable region sequence and a light chain variable region sequence from the combinations shown in Group C in Table 17. In some embodiments, the activatable anti-CD3ε antibody includes a combination of a heavy chain variable region sequence and a light chain variable region sequence from the combinations shown in Group D in Table 17. In some embodiments, the activatable anti-CD3ε antibody includes a combination of a heavy chain variable region sequence and a light chain variable region sequence from the combinations shown in Group E in Table 17. In some embodiments, the activatable anti-CD3ε antibody includes a combination of a heavy chain variable region sequence and a light chain variable region sequence from the combinations shown in Group F in Table 17. In some embodiments, the activatable anti-CD3ε antibody includes a combination of a heavy chain variable region sequence and a light chain variable region sequence from the combinations shown in Group G in Table 17. In some embodiments, the activatable anti-CD3ε antibody includes a combination of a heavy chain variable region sequence and a light chain variable region sequence from the combinations shown in Group H in Table 17. In some embodiments, the activatable anti-CD3ε antibody includes a combination of a heavy chain variable region sequence and a light chain variable region sequence from the combinations shown in Group I in Table 17. In some embodiments, the activatable anti-CD3ε antibody includes a combination of a heavy chain variable region sequence and a light chain variable region sequence from the combinations shown in Group J in Table 17. In some embodiments, the activatable anti-CD3ε antibody includes a combination of a heavy chain variable region sequence and a light chain variable region sequence from the combinations shown in Group K in Table 17. In some embodiments, the activatable anti-CD3ε antibody includes a combination of a heavy chain variable region sequence and a light chain variable region sequence from the combinations shown in Group L in Table 17. In some embodiments, the activatable anti-CD3ε antibody includes a combination of a heavy chain variable region sequence and a light chain variable region sequence from the combinations shown in Group M in Table 17. In some embodiments, the activatable anti-CD3ε antibody includes a combination of a heavy chain variable region sequence and a light chain variable region sequence from the combinations shown in Group N in Table 17. In some embodiments, the activatable anti-CD3ε antibody includes a combination of a heavy chain variable region sequence and a light chain variable region sequence from the combinations shown in Group 0 in Table 17. In some embodiments, the activatable anti-CD3ε antibody includes a combination of a heavy chain variable region sequence and a light chain variable region sequence from the combinations shown in Group P in Table 17. In some embodiments, the activatable anti-CD3ε antibody includes a combination of a heavy chain variable region sequence and a light chain variable region sequence from the combinations shown in Group Q in Table 17.

TABLE 17
Variable Heavy Chain Region (VH) and Variable Light Chain Region
(VL) Sequences for Activatable Antibodies that Bind CDR
Group A

| | |
|---|---|
| VH | QIVLTQSPAIMSASPGEKVTMTCSASSSVSYMNWYQQKSGTSPKRWIYDTSKLASGVPAHFRGSGSGTSYSL |
| | TISGMEAEDAATYYCQQWSSNPFT (SEQ ID NO: 589) |
| VH | QVQLQQSGAELARPGASVKMSCKASGYTFTRYTMHWVKQRPGQGLEWIGYINPSRGYTNYNQKFKDKATLTT |
| | DKSSSTAYMQLSSLTSEDSAVYYCARYYDDHYCLDYWGQG (SEQ ID NO: 590) |
| VH | QVQLVQSGGGVVQPGRSLRLSCKASGYTFTRYTMHWVRQAPGKGLEWIGYINPSRGYTNYNQKFKDRFTIST |
| | DKSKSTAFLQMDSLRPEDTAVYYCARYYDDHYCLDYWGQGTPVTVSS (SEQ ID NO: 591) |
| VH | QVQLVESGGGVVQPGRSLRLSCSSSGYTFTRYTMHWVRQAPGKGLEWVAYINPSRGYTNYNQKFKDRFTISR |
| | DNSKNTLFLQMDSLRPEDTGVYFCARYYDDHYCLDYWGQGTPVTVSS (SEQ ID NO: 592) |
| VL | DIQMTQSPSSLSASVGDRVTITCSASSSVSYMNWYQQTPGKAPKRWIYDTSKLASGVPSRFSGSGSGTDYTF |
| | TISSLQPEDIATYYCQQWSSNPFT (SEQ ID NO: 593) |
| VL | QIVMTQSPSSLSASVGDRVTITCSASSSVSYMNWYQQTPGKAPKRWIYDTSKLASGVPSRFSGSGSGTDYTF |
| VL | DIQMTQSPSSLSASVGDRVTITCSASSSVSYMNWYQQTPGKAPKLLIYDTSKLASGVPSRFSGSGSGTDYTF |
| | TISSLQPEDIATYYCQQWSSNPFTFGQGTKLQITR (SEQ ID NO: 595) |

Group B

| | |
|---|---|
| VH | QVQLQQSGAELARPGASVKMSCKASGYTFTRYTMHWVKQRPGQGLEWIGYINPSRGYTNYNQKFKDKATLTT |
| | DKSSSTAYMQLSSLTSEDSAVYYCARYYDDHYCLDYWGQGTTLTVSS (SEQ ID NO: 596) |
| VH | EVQLVESGGGLVQPGKSLKLSCEASGFTFSGYGMHWVRQAPGRGLESVAYITSSSINIKYADAVKGRFTVSR |
| | DNAKNLLFLQMNILKSEDTAMYYCARFDWDKNYWGQGTMVTVSS (SEQ ID NO: 597) |
| VL | QIVLTQSPAIMSASPGEKVTMTCRASSSVSYMNWYQQKSGTSPKRWIYDTSKVASGVPYRFSGSGSGTSYSL |
| | TISSMEAEDAATYYCQQWSSNPLTFGSGTKLEINR (SEQ ID NO: 598) |
| VL | QIVLTQSPAIMSASPGEKVTMTCSASSSVSYMNWYQQKSGTSPKRWIYDTSKLASGVPAHFRGSGSGTSYSL |
| | TISGMEAEDAATYYCQQWSSNPFTFGSGTKLEINR (SEQ ID NO: 599) |
| VL | DIQMTQSPSSLPASLGDRVTINCQASQDISNYLNWYQQKPGKAPKLLIYYTNKLADGVPSRFSGSGSGRDSS |
| | FTISSLESEDIGSYYCQQYYNYPWTFGPGTKLEIKR (SEQ ID NO: 600) |

Group C

| | |
|---|---|
| VH | MGWSWIFLFLLSGTAGVHSQVQLVQSGAEVKKPGASVKVSCKASGYTFISYTMHWVRQAPGQGLEWMGYINP |
| | RSGYTHYNQKLKDKATLTADKSASTAYMELSSLRSEDTAVYYCARSAYYDYDGFAYWGQGTLVTVSS |
| | (SEQ ID NO: 601) |
| VL | METDTLLLWVLLLWVPGSTGDIQMTQSPSSLSASVGDRVTITCSASSSVSYMNWYQQKPGKAPKRLIYDTSK |
| | LASGVPSRFSGSGSGTDFTLTISSLQPEDFATYYCQQWSSNPPTFGGGTKVEIK (SEQ ID NO: 602) |

Group D

| | |
|---|---|
| VH | EVQLVESGGGLVQPGGSLRLSCAASGYSFTGYTMNWVRQAPGKGLEWVALINPYKGVSTYNQKFKDRFTISV |
| | DKSKNTAYLQMNSLRAEDTAVYYCARSGYYGDSDWYFDVWGQGTLVTVSS (SEQ ID NO: 603) |
| VL | DIQMTQSPSSLSASVGDRVTITCRASQDIRNYLNWYQQKPGKAPKLLIYYTSRLESGVPSRFSGSGSGTDYT |
| | LTISSLQPEDFATYYCQQGNTLPWTFGQGTKVEIK (SEQ ID NO: 604) |
| | MGWSCIILFLVATATGVHSEVQLVESGGGLVQPGGSLRLSCATSGYTFTEYTMHWMRQAPGKGLEWVAGINP |
| HC | KNGGTSHNQRFMDRFTISVDKSTSTAYMQMNSLRAEDTAVYYCARWRGLNYGFDVRYFDVWGQGTLVTVSSA |
| | STKGPSVFPLAPCSRSTSESTAALGCLVKDYFPEPVTVSWNSGALTSGVHTFPAVLQSSGLYSLSSVVTVTS |
| | SNFGTQTYTCNVDHKPSNTKVDKTVERKCCVECPPCPAPPVAGPSVFLFPPKPKDTLMISRTPEVTCVVVDV |
| | SHEDPEVQFNWYVDGMEVHNAKTKPREEQFNSTFRVVSVLTVVHQDWLNGKEYKCKVSNKGLPAPIEKTISK |
| | TKGQPREPQVYTLPPSREEMTKNQVSLTCLVKGFYPSDIAVEWESNGQPENNYKTTPPMLDSDGSFFLYSKL |
| | TVDKSRWQQGNVFSCSVMHEALHNHYTQKSLSLSPGK (SEQ ID NO: 605) |
| HC | EVQLVESGGGLVQPGGSLRLSCATSGYTFTEYTMHWMRQAPGKGLEWVAGINPKNGGTSYADSVKGRFTISV |
| | DKSKNTLYLQMNSLRAEDTAVYYCARWRGLNYGFDVRYFDVWGQGTLVTVSSASTKGPSVFPLAPSSKSTSG |
| | GTAALGCLVKDYFPEPVTVSWNSGALTSGVHTFPAVLQSSGLYSLSSVVTVPSSSLGTQTYICNVNHKPSNT |
| | KVDKKVEPKSCDKTHT (SEQ ID NO: 606) |
| HC | EVQLVESGGGLVQPGGSLRLSCATSGYTFTEYTMHWMRQAPGKGLEWVAGINPKNGGTSHNQRFMDRFTISV |
| | DKSKNTLYLQMNSLRAEDTAVYYCARWRGLNYGFDVRYFDVWGQGTLVTVSSASTKGPSVFPLAPSSKSTSG |
| | GTAALGCLVKDYFPEPVTVSWNSGALTSGVHTFPAVLQSSGLYSLSSVVTVPSSSLGTQTYICNVNHKPSNT |
| | KVDKKVEPKSCDKTHT (SEQ ID NO: 607) |
| HC | EVQLVESGGGLVQPGGSLRLSCATSGYTFTEYTMHWMRQAPGKGLEWVAGINPKNGGTSHNQRFMDRFTLAV |
| | DKSKNTLYLQMNSLRAEDTAVYYCARWRGLNYGFDVRYFDVWGQGTLVTVSSASTKGPSVFPLAPSSKSTSG |
| | GTAALGCLVKDYFPEPVTVSWNSGALTSGVHTFPAVLQSSGLYSLSSVVTVPSSSLGTQTYICNVNHKPSNT |
| | KVDKKVEPKSCDKTHT (SEQ ID NO: 608) |
| HC | EVQLVESGGGLVQPGGSLRLSCATSGYTFTEYTMHWMRQAPGKGLEWVAGINPKNGGTSHNQRFMDRFTISV |
| | DKSTSTAYMQMNSLRAEDTAVYYCARWRGLNYGFDVRYFDVWGQGTLVTVSSASTKGPSVFPLAPSSKSTSG |
| | GTAALGCLVKDYFPEPVTVSWNSGALTSGVHTFPAVLQSSGLYSLSSVVTVPSSSLGTQTYICNVNHKPSNT |
| | KVDKKVEPKSCDKTHT (SEQ ID NO: 609) |
| HC | EVQLVESGGGLVQPGGSLRLSCATSGYTFTEYTMHWMRQAPGKGLEWVAGINPKNGGTSHNQRFMDRFTISV |
| | DKSTSTAYMQMNSLRAEDTAVYYCARWRGLNYGFDVRYFDVWGQGTLVTVSSASTKGPSVFPLAPSSKSTSG |
| | GTAALGCLVKDYFPEPVTVSWNSGALTSGVHTFPAVLQSSGLYSLSSVVTVPSSSLGTQTYICNVNHKPSNT |
| | KVDKKVEPKSCDKTHTCPP (SEQ ID NO: 610) |
| HC | EVQLVESGGGLVQPGGSLRLSCATSGYTFTEYTMHWMRQAPGKGLEWVAGINPKNGGTSHNQRFMDRFTISV |
| | DKSKNTLYMELRSLRAEDTAVYYCARWRGLNYGFDVRYFDVWGQGTLVTVSSASTKGPSVFPLAPSSKSTSG |
| | GTAALGCLVKDYFPEPVTVSWNSGALTSGVHTFPAVLQSSGLYSLSSVVTVPSSSLGTQTYICNVNHKPSNT |
| | KVDKKVEPKSCDKTHT (SEQ ID NO: 611) |
| HC | EVQLVESGGGLVQPGGSLRLSCATSGYTFTEYTMHWMRQAPGKGLEWVAGINPKNGGTSHNQRFMDRFTISV |
| | DKSKNTLYLQMNSLTSEDSGIYYCARWRGLNYGFDVRYFDVWGQGTLVTVSSASTKGPSVFPLAPSSKSTSG |
| | GTAALGCLVKDYFPEPVTVSWNSGALTSGVHTFPAVLQSSGLYSLSSVVTVPSSSLGTQTYICNVNHKPSNT |
| | KVDKKVEPKSCDKTHT (SEQ ID NO: 612) |
| HC | EVQLVESGGGLVQPGGSLRLSCATSGYTFTEYTMHWMRQAPGKGLEWVAGINPKNGGTSHNQRFMDRFTISV |
| | DKSKNTLYLQMNSLRAEDTAVYYCARWRGLNYGFDVRYFDVWGAGTTVTVSSASTKGPSVFPLAPSSKSTSG |
| | GTAALGCLVKDYFPEPVTVSWNSGALTSGVHTFPAVLQSSGLYSLSSVVTVPSSSLGTQTYICNVNHKPSNT |
| | KVDKKVEPKSCDKTHT (SEQ ID NO: 613) |
| HC | EVQLQQSGPELVQPGGSLRLSCATSGYTFTEYTMHWMRQAPGKGLEWVAGINPKNGGTSHNQRFMDRFTISV |
| | DKSKNTLYLQMNSLRAEDTAVYYCARWRGLNYGFDVRYFDVWGQGTLVTVSSASTKGPSVFPLAPSSKSTSG |
| | GTAALGCLVKDYFPEPVTVSWNSGALTSGVHTFPAVLQSSGLYSLSSVVTVPSSSLGTQTYICNVNHKPSNT |
| | KVDKKVEPKSCDKTHT (SEQ ID NO: 614) |
| HC | EVQLVESGGGLVKPGASLRLSCATSGYTFTEYTMHWMRQAPGKGLEWVAGINPKNGGTSHNQRFMDRFTISV |
| | DKSKNTLYLQMNSLRAEDTAVYYCARWRGLNYGFDVRYFDVWGQGTLVTVSSASTKGPSVFPLAPSSKSTSG |
| | GTAALGCLVKDYFPEPVTVSWNSGALTSGVHTFPAVLQSSGLYSLSSVVTVPSSSLGTQTYICNVNHKPSNT |
| | KVDKKVEPKSCDKTHT (SEQ ID NO: 615) |
| HC | EVQLVESGGGLVQPGGSLKISCKTSGYTFTEYTMHWMRQAPGKGLEWVAGINPKNGGTSHNQRFMDRFTISV |
| | DKSKNTLYLQMNSLRAEDTAVYYCARWRGLNYGFDVRYFDVWGQGTLVTVSSASTKGPSVFPLAPSSKSTSG |
| | GTAALGCLVKDYFPEPVTVSWNSGALTSGVHTFPAVLQSSGLYSLSSVVTVPSSSLGTQTYICNVNHKPSNT |
| | KVDKKVEPKSCDKTHT (SEQ ID NO: 616) |
| HC | EVQLVESGGGLVQPGGSLRLSCATSGYTFTEYTMHWMKQSHGKSLEWVAGINPKNGGTSHNQRFMDRFTISV |
| | DKSKNTLYLQMNSLRAEDTAVYYCARWRGLNYGFDVRYFDVWGQGTLVTVSSASTKGPSVFPLAPSSKSTSG |
| | GTAALGCLVKDYFPEPVTVSWNSGALTSGVHTFPAVLQSSGLYSLSSVVTVPSSSLGTQTYICNVNHKPSNT |
| | KVDKKVEPKSCDKTHT (SEQ ID NO: 617) |
| HC | EVQLVESGGGLVQPGGSLRLSCATSGYTFTEYTMHWMRQAPGKGLEWIGGFNPKNGGTSHNQRFMDRFTISV |
| | DKSKNTLYLQMNSLRAEDTAVYYCARWRGLNYGFDVRYFDVWGQGTLVTVSSASTKGPSVFPLAPSSKSTSG |
| | GTAALGCLVKDYFPEPVTVSWNSGALTSGVHTFPAVLQSSGLYSLSSVVTVPSSSLGTQTYICNVNHKPSNT |
| | KVDKKVEPKSCDKTHT (SEQ ID NO: 618) |
| LC | MGWSCIILFLVATATGVHSDIQMTQSPSSLSASVGDRVTITCRASQDINNYLNWYQQKPGKAPKLLIYYTST |
| | LHSGVPSRFSGSGSGTDYTLTISSLQPEDFATYYCQQGNTLPPTFGQGTKVEIKRTVAAPSVFIFPPSDEQL |
| | KSGTASVVCLLNNFYPREAKVQWKVDNALQSGNSQESVTEQDSKDSTYSLSSTLTLSKADYEKHKVYACEVT |
| | HQGLSSPVTKSFNRGEC (SEQ ID NO: 619) |
| LC | DIQMTQSPSSLSASVGDRVTITCRASQDINNYLNWYQQKPGKAPKLLIYYTSTLESGVPSRFSGSGSGTDYT |
| | LTISSLQPEDFATYYCQQGNTLPPTFGQGTKVEIKRTVAAPSVFIFPPSDEQLKSGTASVVCLLNNFYPREA |
| | KVQWKVDNALQSGNSQESVTEQDSKDSTYSLSSTLTLSKADYEKHKVYACEVTHQGLSSPVTKSFNRGEC |
| | (SEQ ID NO: 620) |
| LC | DIQMTQSPSSLSASVGDRVTITCRASQDINNYLNWYQQKPGKAPKLLIYYTSTLHSGVPSRFSGSGSGTDYT |
| | LTISSLQPEDFATYYCQQGNTLPPTFGQGTKVEIKRTVAAPSVFIFPPSDEQLKSGTASVVCLLNNFYPREA |
| | KVQWKVDNALQSGNSQESVTEQDSKDSTYSLSSTLTLSKADYEKHKVYACEVTHQGLSSPVTKSFNRGEC |
| | (SEQ ID NO: 621) |

Group E

| | |
|---|---|
| HC | MERHWIFLLLLSVTAGVHSQVQLQQSGAELARPGASVKMSCKASGYTFTRYTMHWVKQRPGQGLEWIGYINP |
| | SRGYTNYNQKFKDKATLTTDKSSSTAYMQLSSLTSEDSAVYYCARYYDDHYCLDYWGQGTTLTVSSAKTTAP |
| | SVYPLAPVCGDTTGSSVTLGCLVKGYFPEPVTLTWNSGSLSSGVHTFPAVLQSDLYTLSSSVTVTSSTWPSQ |
| | SITCNVAHPASSTKVDKKIEPRGPTIKPCPPCKCPAPNLLGGPSVFIFPPKIKDVLMISLSPIVTCVVVDVS |
| | EDDPDVQISWFVNNVEVHTAQTQTHREDYNSTLRVVSALPIQHQDWMSGKEFKCKVNNKDLPAPIERTISKP |
| | KGSVRAPQVYVLPPPEEEMTKKQVTLTCMVTDFMPEDIYVEWTNNGKTELNYKNTEPVLDSDGSYFMYSKLR |
| | VEKKNWVERNSYSCSVVHEGLHNHHTTKSFSRTPGK (SEQ ID NO: 622) |
| LC | MDFQVQIFSFLLISASVIISRGQIVLTQSPAIMSASPGEKVTMTCSASSSVSYMNWYQQKSGTSPKRWIYDT |
| | SKLASGVPAHFRGSGSGTSYSLTISGMEAEDAATYYCQQWSSNPFTFGSGTKLEINRADTAPTVSIFPPSSE |
| | QLTSGGASVVCFLNNFYPKDINVKWKIDGSERQNGVLNSWTDQDSKDSTYSMSSTLTLTKDEYERHNSYTCE |
| | ATHKTSTSPIVKSFNRNEC (SEQ ID NO: 623) |

Group F

| | |
|---|---|
| VH | EVQLLESGGGLVQPGGSLRLSCAASGFTFSSFPMAWVRQAPGKGLEWVSTISTSGGRTYYRDSVKGRFTISR |
| | DNSKNTLYLQMNSLRAEDTAVYYCAKFRQYSGGFDYWGQGTLVTVSS (SEQ ID NO: 624) |
| VL | DFMLTQPHSVSESPGKTVIISCTLSSGNIENNYVHWYQQRPGRAPTTVIFDDDKRPDGVPDRFSGSIDRSSN |
| | SASLTISGLQTEDEADYYCHSYVSSFNVFGGGTKLTVLGQPKAAPSVTLFPPSSEELQ |
| | (SEQ ID NO: 625) |

Group G

| | |
|---|---|
| HC | EVQLLESGGGLVQPGGSLRLSCAASGFTFSSFPMAWVRQAPGKGLEWVSTISTSGGRTYYRDSVKGRFTISR |
| | DNSKNTLYLQMNSLRAEDTAVYYCAKFRQYSGGFDYWGQGTLVTVSSASTKGPSVFPLAPSSKSTSGGTAAL |
| | GCLVKDYFPEPVTVSWNSGALTSGVHTFPAVLQSSGLYSLSSVVTVPSSSLGTQTYICNVNHKPSNTKVDKK |
| | VEPKSCDKTHTCPPCPAPELLGGPSVFLFPPKPKDTLMISRTPEVTCVVVDVSHEDPEVKFNWYVDGVEVHN |
| | AKTKPREEQYASTYRVVSVLTVLHQDWLNGKEYKCKVSNKALPAPIEKTISKAKGQPREPQVYTLPPSRDEL |
| | TKNQVSLTCLVKGFYPSDIAVEWESNGQPENNYKTTPPVLDSDGSFFLYSKLTVDKSRWQQGNVFSCSVMHE |
| | ALHNHYTQKSLSLSPGK (SEQ ID NO: 626) |
| VL | QAVVTQANSVSTSLGSTVKLSCTLSSGNIENNYVHWYQLYEGRSPTTMIYDDDKRPDGVPDRFSGSIDRSSN |
| | SAFLTIHNVAIEDEAIYFCHSYVSSFNVFGGGTKLTVLR (SEQ ID NO: 627) |
| LC | QAVVTQANSVSTSLGSTVKLSCTLSSGNIENNYVHWYQLYEGRSPTTMIYDDDKRPDGVPDRFSGSIDRSSN |
| | SAFLTIHNVAIEDEAIYFCHSYVSSFNVFGGGTKLTVLRQPKAAPSVTLFPPSSEELQANKATLVCLISDFY |
| | PGAVTVAWKADSSPVKAGVETTTPSKQSNNKYAASSYLSLTPEQWKSHRSYSCQVTHEGSTVEKTVAPTECS |
| | (SEQ ID NO: 628) |

Group H

| | |
|---|---|
| VH | EVKLVESGGGLVQPGGSLRLSCAASGFTFNTYAMNWVRQAPGKGLEWVARIRSKYNNYATYYADSVKDRFTI |
| | SRDDSKSSLYLQMNNLKTEDTAMYYCVRHGNFGNSYVSWFAYWGQGTLVTVSS (SEQ ID NO: 629) |
| VH | EVKLVESGGGLVKPGRSLRLSCAASGFTFNTYAMNWVRQAPGKGLEWVARIRSKYNNYATYYADSVKDRFTI |
| | SRDDSKSILYLQMNNLKTEDTAMYYCVRHGNFGNSYVSWFAYWGQGTLVTVSS (SEQ ID NO: 630) |
| VH | EVKLVESGGGLVKPGRSLRLSCAASGFTFNTYAMNWVRQAPGKGLEWVARIRSKYNNYATYYADSVKDRFTI |
| | SRDDSKSILYLQMNSLKTEDTAMYYCVRHGNFGNSYVSWFAYWGQGTLVTVSS (SEQ ID NO: 631) |
| VH | EVKLVESGGGLVKPGRSLRLSCAASGFTFNTYAMNWVRQAPGKGLEWVARIRSKYNNYATYYADSVKDRFTI |
| | SRDDSKSILYLQMNSLKTEDTAMYYCVRHGNFGNSYVSWFAYWGQGTMVTVSS (SEQ ID NO: 632) |
| VL | QAVVTOEPSFSVSPGGTVTLTCRSSTGAVTTSNYANWVQQTPGQAFRGLIGGTNKRAPGVPARFSGSLIGDK |
| | AALTITGAQADDESIYFCALWYSNLWVFGGGTKLTVL (SEQ ID NO: 633) |
| VL | QAVVTOEPSFSVSPGGTVTLTCRSSTGAVTTSNYANWVQQTPGQAFRGLIGGTNKRAPGVPARFSGSILGNK |
| | AALTITGAQADDESIYFCALWYSNLWVFGGGTKLTVL (SEQ ID NO: 634) |
| VL | QAVVTOEPSFSVSPGGTVTLTCRSSTGAVTTSNYANWVQQTPGQAFRGLIGGTNKRAPGVPARFSGSILGNK |
| | AALTITGAQADDESDYYCALWYSNLWVFGGGTKLTVL (SEQ ID NO: 635) |

Group I

| | |
|---|---|
| VH | EVQLVESGGGLVQPGRSLRLSCAASGFTFDDYTMHWVRQAPGKGLEWVSGISWNSGSIGYADSVKGRFTISR |
| | DNAKKSLYLQMNSLRAEDTALYYCAKDNSGYGHYYYGMDVWGQGTTVTVAS (SEQ ID NO: 636) |
| VH | EVQLVESGGGLVQPGGSLRLSCAATGFTFDDFTMHWVRQAPGKGLEWVSGISWNSGSIGYVDSVKGRFTISR |
| | DNAKNSLYLQMNSLRAEDTALYYCAKDNSGYGYYYYGMDVWGQGTTVTVSS (SEQ ID NO: 637) |
| VH | QVQLVESGGGVVQPGRSLRLSCAASGFTFRSYAMHWVRQAPGKGLEWVAMVYYDGNNQYYADSVRGRFTISR |
| | DNSKNTLYLQMNSLRADDTAVYFCARGPGYNWLDPWGQGTLVTVSS (SEQ ID NO: 638) |
| VH | QVQLVESGGGVVQPGRSLRLACVASGFTFRSYGMHWVRQAPGKGLQWVAMIYYDGKNKYYADSVRGRFTISR |
| | DNSKNTLYLQMNNLRVEDTAMYFCARGPGYNWLDPWGQGTLVTVSS (SEQ ID NO: 639) |
| VH | DVQLVQSGAEVKKPGASVKVSCKASGYTFTRYTMHWVRQAPGQGLEWIGYINPSRGYTNYADSVKGRFTITT |
| | DKSTSTAYMELSSLRSEDTATYYCARYYDDHYCLDYWGQGTTVTVSS (SEQ ID NO: 640) |
| VL | AEIVMTQSPATLSVSPGERATLSCRASQSVSSNLAWYQQKPGQAPRLLIYGASTRATGIPARFSGSGSGTEF |
| | TLTISSLQSEDFAVYYCQHYINWPLTFGGGTKVEIK (SEQ ID NO: 641) |
| VL | EIVMTQSPATLSVSPGERATLSCRASHSVSRNSAWYQQKPGQAPRLLIYGASTRATGIPARFSGSGSGTEFT |
| | LTISSLQSEDFAIYYCQQYNNWPLTFGGGTKVEIK (SEQ ID NO: 642) |
| VL | EIVMTQSPATLSVSPGERATLSCRASQSVSSNLAWYQQKPGQAPRLLIYGASTRATGIPARFSGSGSGTEFT |
| | LTISSLQSEDFAVYYCQHYINWPLTFGGGTKVEIK (SEQ ID NO: 643) |
| VL | EIVMTQSPATLSVSPGERATLSCRASQSVSRNLAWYQQKPGQAPRLLIYGASTRATGIPARFSGSGSGTDFT |
| | LTISSLQSEDFAVYYCQQYNNWPLTFGGGTKVVIK (SEQ ID NO: 644) |
| VL | EIVMTQSPATLSVSPGERATLSCRASQRISSNLAWYQQKPGQAPRLLIYGASTRATGSPARFSGSGSGTDFT |
| | LTISSLQSEDVAVYYCQQHHNWPLTFGGGTKVEIK (SEQ ID NO: 645) |
| VL | DIVLTQSPATLSLSPGERATLSCRASQSVSYMNWYQQKPGKAPKRWIYDTSKVASGVPARFSGSGSGTDYSL |
| | TINSLEAEDAATYYCQQWSSNPLTFGGGTKVEIK (SEQ ID NO: 646) |

Group J

| | |
|---|---|
| VH | QVQLVQSGAEVKKPGASVKVSCKASGYTFTRYTMHWVRQAPGQGLEWMGYINPSRGYTNYNQKFKDRVTMTT |
| | DTSISTAYMELSRLRSDDTAVYYCARYYDDHYCLDYWGQGTLVTVSS (SEQ ID NO: 647) |
| VH | QVQLVQSGAEVKKPGASVKVSCKASGYTFTRYTMHWVRQAPGQGLEWMGYINPSRGYTNYNQKFKDRVTMTT |
| | DTSISTAYMELSRLRSDDTAVYYCARYYDDHYSLDYWGQGTLVTVSS (SEQ ID NO: 648) |
| VL | EIVLTQSPATLSLSPGERATLSCSASSSVSYMNWYQQKPGQAPRLLIYDTSKLASGVPAHFRGSGSGTDYTL |
| | TISSLEPEDFAVYYCQQWSSNPFTFGQGTKVEIK (SEQ ID NO: 649) |

Group K

| | |
|---|---|
| VH | QVQLQQSGAELARPGASVKMSCKASGYTFTRYTMHWVKQRPGQGLEWIGYINPSRGYTNYNQKFKDKATLTT |
| | DKSSSTAYMQLSSLTSEDSAVYYCARYYDDHYCLDYWGQGTTLTVSS (SEQ ID NO: 596) |
| VL | QIVLTQSPAIMSASPGEKVTMTCSASSSVSYMNWYQQKSGTSPKRWIYDTSKLASGVPAHFRGSGSGTSYSL |
| | TISGMEAEDAATYYCQQWSSNPFTFGSGTKLEIN (SEQ ID NO: 650) |

Group L

| | |
|---|---|
| VH | QVQLVQSGSELKKPGASVKMSCKASGYTFTRYTMHWVRQAPGKGLEWIGYINPSRGYTNYNQKFKDRATLTT |
| | DKSTSTAYMQLSSLRSEDTAVYYCARYYDDHYSLDYWGQGTLVTVSS (SEQ ID NO: 651) |
| VL | QIVLTQSPATLSLSPGERATMSCSASSSVSYMNWYQQKPGKAPKRWIYDTSKLASGVPSRFRGSGSGTDYTL |
| | TISSLQPEDFATYYCQQWSSNPFTFGGGTKVEIK(SEQ ID NO: 652) |

Group M

| | |
|---|---|
| VH | EVQLVESGGGLVQPGGSLRLSCAASGFTFSTYAMNWVRQAPGKGLEWVGRIRSKYNNYATYYADSVKDRFTI |
| | SRDDSKNSLYLQMNSLKTEDTAVYYCARHGNFGNSYVSWFAYWGQGTLVTVSS (SEQ ID NO: 653) |
| VH | EVQLVESGGGLVQPGGSLRLSCAASGFTFNTYAMNWVRQAPGKGLEWVGRIRSKYNNYATYYADSVKDRFTI |
| | SRDDSKNSLYLQMNSLKTEDTAVYYCARHGNFGNSYVSWFAYWGQGTLVTVSS (SEQ ID NO: 654) |
| VH | EVQLVESGGGLVQPGGSLRLSCAASGFTFSTYAMNWVRQAPGKGLEWVARIRSKYNNYATYYADSVKDRFTI |
| | SRDDSKNSLYLQMNSLKTEDTAVYYCARHGNFGNSYVSWFAYWGQGTLVTVSS (SEQ ID NO: 655) |
| VH | EVQLVESGGGLVQPGGSLRLSCAASGFTFSTYAMNWVRQAPGKGLEWVGRIRSKYNNYATYYADSVKDRFTI |
| | SRDDSKNSLYLQMNSLKTEDTAVYYCVRHGNFGNSYVSWFAYWGQGTLVTVSS (SEQ ID NO: 656) |
| VH | EVQLVESGGGLVQPGGSLRLSCAASGFTFNTYAMNWVRQAPGKGLEWVARIRSKYNNYATYYADSVKDRFTI |
| | SRDDSKNSLYLQMNSLKTEDTAVYYCARHGNFGNSYVSWFAYWGQGTLVTVSS (SEQ ID NO: 657) |
| VH | EVQLVESGGGLVQPGGSLRLSCAASGFTFNTYAMNWVRQAPGKGLEWVGRIRSKYNNYATYYADSVKDRFTI |
| | SRDDSKNSLYLQMNSLKTEDTAVYYCVRHGNFGNSYVSWFAYWGQGTLVTVSS (SEQ ID NO: 658) |
| VH | EVQLVESGGGLVQPGGSLRLSCAASGFTFNTYAMNWVRQAPGKGLEWVGRIRNKYNNYATEYADSVKDRFTI |
| | SRDDSKNSLYLQMNSLKTEDTAVYYCVRHGNFGNSYVSWFAYWGQGTLVTVSS (SEQ ID NO: 659) |
| VH | EVQLVESGGGLVQPGGSLRLSCAASGFTFSTYAMNWVRQAPGKGLEWVARIRSKYNNYATYYADSVKDRFTI |
| | SRDDSKNSLYLQMNSLKTEDTAVYYCVRHGNFGNSYVSWFAYWGQGTLVTVSS (SEQ ID NO: 660) |
| VH | EVQLVESGGGLVQPGGSLRLSCAASGFTFNTYAMNWVRQAPGKGLEWVARIRSKYNNYATYYADSVKDRFTI |
| | SRDDSKNSLYLQMNSLKTEDTAVYYCVRHGNFGNSYVSWFAYWGQGTLVTVSS (SEQ ID NO: 661) |
| VH | EVQLVESGGGLVQPGGSLRLSCAASGFTFNTYAMNWVRQAPGKGLEWVARIRNKYNNYATEYADSVKDRFTI |
| | SRDDSKNSLYLQMNSLKTEDTAVYYCVRHGNFGNSYVSWFAYWGQGTLVTVSS (SEQ ID NO: 662) |
| VH | EVQLVESGGGLVQPGGSLRLSCAASGFTFNTYAMNWVRQAPGKGLEWVARTRSKANSYTTYYAASVKGRFTI |
| | SRDDSKNSLYLQMNSLKTEDTAVYYCARHGNFGNSYVSWFAYWGQGTLVTVSS (SEQ ID NO: 663) |
| VH | EVQLVESGGGLVQPGGSLRLSCAASGFTFNTYAMNWVRQAPGKGLEWVGRTRSKANSYTTYYAASVKGRFTI |
| | SRDDSKNSLYLQMNSLKTEDTAVYYCARHGNFGNSYVSWFAYWGQGTLVTVSS (SEQ ID NO: 664) |
| VH | EVQLVESGGGLVQPGGSLRLSCAASGFTFNTYAMNWVRQAPGKGLEWVGRIRSKYNNYATEYAASVKDRFTI |
| | SRDDSKNSLYLQMNSLKTEDTAVYYCVRHGNFGNSYVSWFAYWGQGTLVTVSS (SEQ ID NO: 665) |
| VH | EVQLVESGGGLVQPGGSLRLSCAASGFTFNTYAMNWVRQAPGKGLEWVARIRNKYNNYATEYAASVKDRFTI |
| | SRDDSKNSLYLQMNSLKTEDTAVYYCVRHGNFGNSYVSWFAYWGQGTLVTVSS (SEQ ID NO: 666) |
| VH | EVQLVESGGGLVQPGGSLRLSCAASGFTFNTYAMNWVRQAPGKGLEWVGRTRSKANSYTTYYAASVKGRFTI |
| | SRDDSKNSLYLQMNSLKTEDTAVYYCARHGNFGNSYVSWFAYWGQGTLVTVSS (SEQ ID NO: 667) |
| VH | EVQLVESGGGLVQPGGSLRLSCAASGFTFNTYAMNWVRQAPGKGLEWVARTRSKANSYTTYYAASVKGRFTI |
| | SRDDSKNSLYLQMNSLKTEDTAVYYCARHGNFGNSYVSWFAYWGQGTLVTVSS (SEQ ID NO: 668) |
| VH | QVQLVQSGAEVKKPGASVKVSCKASGYTFTRSTMHWVRQAPGQGLEWIGYINPSSAYTNYNQKFKDRVTITA |
| | DKSTSTAYMELSSLRSEDTAVYYCASPQVHYDYNGFPYWGQGTLVTVSS (SEQ ID NO: 669) |
| VL | QAVVTQEPSLTVSPGGTVTLTCRSSTGAVTTSNYANWFQQKPGQAPRTLIGGTNKRAPWTPARFSGSLLGGK |
| | AALTITGAQAEDEADYYCALWYSNLWVFGGGTKLTVLG (SEQ ID NO: 670) |
| VL | QAVVTQEPSLTVSPGGTVTLTCRSSTGAVTTSNYANWVQQKPGQAPRTLIGGTNKRAPWTPARFSGSLLGGK |
| | AALTITGAQAEDEADYYCALWYSNLWVFGGGTKLTVLG (SEQ ID NO: 671) |
| VL | QAVVTQEPSLTVSPGGTVTLTCRSSTGAVTTSNYANWFQEKPGQAPRTLIGGTNKRAPWTPARFSGSLLGGK |
| | AALTITGAQAEDEADYYCALWYSNLWVFGGGTKLTVLG (SEQ ID NO: 672) |
| VL | QAVVTQEPSLTVSPGGTVTLTCRSSTGAVTTSNYANWFQQKPGQAPRGLIGGTNKRAPWTPARFSGSLLGGK |
| | AALTITGAQAEDEADYYCALWYSNLWVFGGGTKLTVLG (SEQ ID NO: 673) |
| VL | QAVVTQEPSLTVSPGGTVTLTCRSSTGAVTTSNYANWVQEKPGQAPRTLIGGTNKRAPWTPARFSGSLLGGK |
| | AALTITGAQAEDEADYYCALWYSNLWVFGGGTKLTVLG (SEQ ID NO: 674) |
| VL | QAVVTQEPSLTVSPGGTVTLTCRSSTGAVTTSNYANWVQQKPGQAPRGLIGGTNKRAPWTPARFSGSLLGGK |
| | AALTITGAQAEDEADYYCALWYSNLWVFGGGTKLTVLG (SEQ ID NO: 675) |
| VL | QAVVTQEPSLTVSPGGTVTLTCRSSTGAVTTSNYANWFQEKPGQAPRGLIGGTNKRAPWTPARFSGSLLGGK |
| | AALTITGAQAEDEADYYCALWYSNLWVFGGGTKLTVLG (SEQ ID NO: 676) |
| VL | QAVVTQEPSLTVSPGGTVTLTCRSSTGAVTTSNYANWVQEKPGQAPRGLIGGTNKRAPWTPARFSGSLLGGK |
| | AALTITGAQAEDEADYYCALWYSNLWVFGGGTKLTVLG (SEQ ID NO: 677) |
| VL | QAVVTQEPSLTVSPGGTVTLTCRSSTGAVTTSNYANWVQEKPGQAFRGLIGGTNKRAPWTPARFSGSLLGGK |
| | AALTITGAQAEDEADYYCALWYSNLWVFGGGTKLTVLG (SEQ ID NO: 678) |
| VL | DIQMTQSPSSLSASVGDRVTITCSASSSVSYMNWYQQKPGKAPKRLIYDSSKLASGVPSRFSGSGSGTEFTL |
| | TISSLQPEDFATYYCQQWSRNPPTFGGGTKVEIK (SEQ ID NO: 679) |
| VL | DVVMTQSPAIMSAFPGEKVTITCSASSSVSYMNWYQQKPGKAPKRWIYDSSKLASGVPSRFSGSGSGTEFTL |
| | TISSLQPEDFATYYCQQWSRNPPTFGGGTKVEIK (SEQ ID NO: 680) |

Group N

| | |
|---|---|
| VH | QVQLVQSGAEVKKPGASVKVSCKASGYTFTRSTMHWVKQAPGQGLEWIGYINPSSAYTNYNQKFKDKATLTA |
| | DKSSSTAYMQLSSLRSEDTAVYYCARPQVHYDYNGFPYWGQGTLVTVSS (SEQ ID NO: 681) |
| VH | QVQLVQSGGGVVQPGRSLRLSCKASGYTFTRSTMHWVRQAPGKGLEWIGYINPSSAYTNYNQKFKDKATLTA |
| | DKSKNTAYMELSSLRSEDTAVYYCARPQVHYDYNGFPYWGQGTLVTVSS (SEQ ID NO: 682) |
| VH | QVQLVQSGGGVVQPGRSLRLSCKASGYTFTRSTMHWVRQAPGKGLEWIGYINPSSAYTNYNQKFKDRFTISA |
| | DKSKSTAFLQMDSLRPEDTGVYFCARPQVHYDYNGFPYWGQGTPVTVSS (SEQ ID NO: 683) |
| VH | QVQLVESGGGVVQPGRSLRLSCKASGYTFTRSTMHWVRQAPGQGLEWIGYINPSSAYTNYNQKFKDRFTISA |
| | DKSKSTAFLQMDSLRPEDTGVYFCARPQVHYDYNGFPYWGQGTPVTVSS (SEQ ID NO: 684) |
| VH | QVQLVQSGAEVKKPGASVKVSCKASGYTFTRSTMHWVRQAPGQRLEWMGYINPSSAYTNYNQKFKDRVTITR |
| | DTSASTAYMELSSLRSEDTAVYYCARPQVHYDYNGFPYWGQGTLVTVSS (SEQ ID NO: 685) |
| VH | EVQLVESGGGLVKPGGSLRLSCAASGFTFSRSTMHWVRQAPGKGLEWVSYINPSSAYTNYNQKFKDRFTISR |
| | DNAKNSLYLQMNSLRAEDTAVYYCARPQVHYDYNGFPYWGQGTLVTVSS(SEQ ID NO: 686) |
| VL | AQDIQMTQSPSSLSASVGDRVTMTCSASSSVSYMNWYQQKPGKAPKLLIYDSSKLASGVPARFSGSGSGTDY |
| | TLTISSLQPEDFATYYCQQWSRNPPTFGGGTKVEIK (SEQ ID NO: 687) |
| VL | EIVLTQSPATLSLSPGERATLSCSASSSVSYMNWYQQKPGQAPRLLIYDSSKLASGIPARFSGSGSGTDFTL |
| | TISSLEPEDFAVYYCQQWSRNPPTFGGGTKVEIK (SEQ ID NO: 688) |
| VL | AQDIQMTQSPSSLSASVGDRVTMTCSASSSVSYMNWYQQKPGKAPKRWIYDSSKLASGVPARFSGSGSGTDY |
| | TLTISSLQPEDFATYYCQQWSRNPPTFGGGTKLQIT (SEQ ID NO: 689) |
| VL | AQDIQMTQSPSSLSASVGDRVTITCSASSSVSYMNWYQQTPGKAPKRWIYDSSKLASGVPSRFSGSGSGTDF |
| | TLTISSLQPEDIATYYCQQWSRNPPTFGQGTKLQIT (SEQ ID NO: 690) |

Group O

| | |
|---|---|
| VH | QVQLVESGGGVVQPGRSLRLSCAASGFKFSGYGMHWVRQAPGKGLEWVAVIWYDGSKKYYVDSVKGRFTISR |
| | DNSKNTLYLQMNSLRAEDTAVYYCARQMGYWHFDLWGRGTLVTVSS (SEQ ID NO: 691) |
| VH | QVQLVQSGGGVVQSGRSLRLSCAASGFKFSGYGMHWVRQAPGKGLEWVAVIWYDGSKKYYVDSVKGRFTISR |
| | DNSKNTLYLQMNSLRGEDTAVYYCARQMGYWHFDLWGRGTLVTVSS (SEQ ID NO: 692) |
| VH | QVQLVESGGGVVQPGRSLRLSCAASGFTFRSYGMHWVRQAPGKGLEWVAIIWYDGSKKNYADSVKGRFTISR |
| | DNSKNTLYLQMNSLRAEDTAVYYCARGTGYNWFDPWGQGTLVTVSS (SEQ ID NO: 693) |
| VH | QVQLVQSGGGVVQPGRSLRLSCVASGFTFSSYGMHWVRQAPGKGLEWVAAIWYNGRKQDYADSVKGRFTISR |
| | DNSKNTLYLQMNSLRAEDTAVYYCTRGTGYNWFDPWGQGTLVTVSS (SEQ ID NO: 694) |
| VL | EIVLTQSPATLSLSPGERATLSCRASQSVSSYLAWYQQKPGQAPRLLIYDASNRATGIPARFSGSGSGTDFT |
| | LTISSLEPEDFAVYYCQQRSNWPPLTFGGGTKVEIK (SEQ ID NO: 695) |
| VL | EIVLTQSPRTLSLSPGERATLSCRASQSVSSSYLAWYQQKPGQAPRLLIYGASSRATGIPDRFSGSGSGTDF |
| | TLTISRLDPEDFAVYYCQQYGSSPITFGQGTRLEIK (SEQ ID NO: 696) |
| VL | DILMTQSPSSLSASVGDRVTITCRASQGISSALAWYQQKPGKAPKLLIYYASSLQSGVPSRFSGSGSGTDYT |
| | LTISSLQPEDFATYYCQQYYSTLTFGGGTKVEIK (SEQ ID NO: 697) |
| VL | DIVMTQSPSSLSASVGDRVTITCRASQGISSALAWYQQKPGKAPKLLIYDASSLGSGVPSRFSGSGSGTDFT |
| | LTISSLQPEDFATYYCQQYYSTLTFGGGTKVEIK (SEQ ID NO: 698) |
| VL | DIQMTQSPFSLSASVGDRVTITCWASQGISSYLAWYQQKPAKAPKLFIYYASSLQSGVPSRFSGSGSGTDYT |
| | LTISSLQPEDFATYYCQQYYSTLTFGGGTKVEIK (SEQ ID NO: 699) |
| VL | DIEMTQSPFSLSASVGDRVTITCWASQGISSYLAWYQQKPAKAPKLFIYYASSLQSGVPSRFSGSGSGTDYT |
| | LTISSLQPEDFATYYCQQYYSTLTFGGGTKVEIK (SEQ ID NO: 700) |
| VL | EIVLTQSPATLSLSPGERATLSCRASQSVSSYLAWYQQKPGQAPRLLIYDASNRATGIPARFSGSGSGTDFT |
| | LTISSLEPEDFAVYYCQQRSNWPWTFGQGTKVEIK (SEQ ID NO: 701) |
| VL | AIQLTQSPSSLSASVGDRVTITCRASQGISSALAWYQQKPGKAPKLLIYDASSLESGVPSRFSGSGSGTDFT |
| | LTISSLQPEDFATYYCQQFNSYPITFGQGTRLEIK (SEQ ID NO: 702) |

Group P

| | |
|---|---|
| VH | QVQLVQSGAEVKKPGASVKVSCKASGYTFISYTMHWVRQAPGQGLEWMGYINPRSGYTHYNQKLKDKATLTA |
| | DKSASTAYMELSSLRSEDTAVYYCARSAYYDYDGFAYWGQGTLVTVSS (SEQ ID NO: 703) |
| VL | DIQMTQSPSSLSASVGDRVTITCSASSSVSYMNWYQQKPGKAPKRLIYDTSKLASGVPSRFSGSGSGTDFTL |
| | TISSLQPEDFATYYCQQWSSNPPTFGGGTKVEIK (SEQ ID NO: 704) |

Group Q

| | |
|---|---|
| VH | EVQLVESGGGLVQPGGSLRLSCAASGFTFNTYAMNWVRQAPGKGLEWVGRIRSKYNNYATYYADSVKGRFTI |
| | SRDDSKNTLYLQMNSLRAEDTAVYYCVRHGNFGNSYVSWFAYWGQGTLVTVSS (SEQ ID NO: 705) |
| VH | EVQLVESGGGDVQPGGSLRLSCAASGFTFNTYAMNWVRQAPGKGLEWVGRIRSKYNNYATYYADSVKGRFTI |
| | SRDDSKNTLYLQMNSLRAEDTAVYYCVRHGNFGNSYVSWFAYWGQGTLVTVSS (SEQ ID NO: 706) |
| VH | EVQLVESGGGKVQPGGSLRLSCAASGFTFNTYAMNWVRQAPGKGLEWVGRIRSKYNNYATYYADSVKGRFTI |
| | SRDDSKNTLYLQMNSLRAEDTAVYYCVRHGNFGNSYVSWFAYWGQGTLVTVSS (SEQ ID NO: 707) |
| VH | EVQLVESGGGNVQPGGSLRLSCAASGFTFNTYAMNWVRQAPGKGLEWVGRIRSKYNNYATYYADSVKGRFTI |
| | SRDDSKNTLYLQMNSLRAEDTAVYYCVRHGNFGNSYVSWFAYWGQGTLVTVSS (SEQ ID NO: 708) |
| VH | EVQLVESGGGSVQPGGSLRLSCAASGFTFNTYAMNWVRQAPGKGLEWVGRIRSKYNNYATYYADSVKGRFTI |
| | SRDDSKNTLYLQMNSLRAEDTAVYYCVRHGNFGNSYVSWFAYWGQGTLVTVSS (SEQ ID NO: 709) |
| VH | EVQLVESGGGLVQPGGSLKLSCAASGFTFNTYAMNWVRQAPGKGLEWVGRIRSKYNNYATYYADSVKGRFTI |
| | SRDDSKNTLYLQMNSLRAEDTAVYYCVRHGNFGNSYVSWFAYWGQGTLVTVSS (SEQ ID NO: 710) |
| VH | EVQLVESGGGLVQPGGSLRLSCAASGFTFSTYAMNWVRQAPGKGLEWVGRIRSKYNNYATYYADSVKGRFTI |
| | SRDDSKNTLYLQMNSLRAEDTAVYYCVRHGNFGNSYVSWFAYWGQGTLVTVSS (SEQ ID NO: 711) |
| VH | EVQLVESGGGLVQPGGSLRLSCAASGFTFNTYAMHWVRQAPGKGLEWVGRIRSKYNNYATYYADSVKGRFTI |
| | SRDDSKNTLYLQMNSLRAEDTAVYYCVRHGNFGNSYVSWFAYWGQGTLVTVSS (SEQ ID NO: 712) |
| VH | EVQLVESGGGLVQPGGSLRLSCAASGFTFNTYAMSWVRQAPGKGLEWVGRIRSKYNNYATYYADSVKGRFTI |
| | SRDDSKNTLYLQMNSLRAEDTAVYYCVRHGNFGNSYVSWFAYWGQGTLVTVSS (SEQ ID NO: 713) |
| VH | EVQLVESGGGLVQPGGSLRLSCAASGFTFNTYAMNWVRQASGKGLEWVGRIRSKYNNYATYYADSVKGRFTI |
| | SRDDSKNTLYLQMNSLRAEDTAVYYCVRHGNFGNSYVSWFAYWGQGTLVTVSS (SEQ ID NO: 714) |
| VH | EVQLVESGGGLVQPGGSLRLSCAASGFTFNTYAMNWVRQAPGKGLEWVGRIRSKANNYATYYADSVKGRFTI |
| | SRDDSKNTLYLQMNSLRAEDTAVYYCVRHGNFGNSYVSWFAYWGQGTLVTVSS (SEQ ID NO: 715) |
| VH | EVQLVESGGGLVQPGGSLRLSCAASGFTFNTYAMNWVRQAPGKGLEWVGRIRSKANSYATYYADSVKGRFTI |
| | SRDDSKNTLYLQMNSLRAEDTAVYYCVRHGNFGNSYVSWFAYWGQGTLVTVSS (SEQ ID NO: 716) |
| VH | EVQLVESGGGLVQPGGSLRLSCAASGFTFNTYAMNWVRQAPGKGLEWVGRIRSKYNNYATAYADSVKGRFTI |
| | SRDDSKNTLYLQMNSLRAEDTAVYYCVRHGNFGNSYVSWFAYWGQGTLVTVSS (SEQ ID NO: 717) |
| VH | EVQLVESGGGLVQPGGSLRLSCAASGFTFNTYAMNWVRQAPGKGLEWVGRIRSKYNNYATYYAASVKGRFTI |
| | SRDDSKNTLYLQMNSLRAEDTAVYYCVRHGNFGNSYVSWFAYWGQGTLVTVSS (SEQ ID NO: 718) |
| VH | EVQLVESGGGLVQPGGSLRLSCAASGFTFNTYAMNWVRQAPGKGLEWVGRIRSKYNNYATYYADSVKGRFTI |
| | SRDNSKNTLYLQMNSLRAEDTAVYYCVRHGNFGNSYVSWFAYWGQGTLVTVSS (SEQ ID NO: 719) |
| VH | EVQLVESGGGLVQPGGSLRLSCAASGFTFNTYAMNWVRQAPGKGLEWVGRIRSKYNNYATYYADSVKGRFTI |
| | SRDTSKNTLYLQMNSLRAEDTAVYYCVRHGNFGNSYVSWFAYWGQGTLVTV (SEQ ID NO: 720) |
| VH | EVQLVESGGGLVQPGGSLRLSCAASGFTFNTYAMNWVRQAPGKGLEWVGRIRSKYNNYATYYADSVKGRFTI |
| | SRDDSKNTAYLQMNSLRAEDTAVYYCVRHGNFGNSYVSWFAYWGQGTLVTVSS (SEQ ID NO: 721) |
| VH | EVQLVESGGGLVQPGGSLRLSCAASGFTFNTYAMNWVRQAPGKGLEWVGRIRSKYNNYATYYADSVKGRFTI |
| | SRDDSKNTLYLQMNSLRDEDTAVYYCVRHGNFGNSYVSWFAYWGQGTLVTVSS (SEQ ID NO: 722) |
| VH | EVQLVESGGGLVQPGGSLRLSCAASGFTFNTYAMNWVRQAPGKGLEWVGRIRSKYNNYATYYADSVKGRFTI |
| | SRDDSKNTLYLQMNSLRKEDTAVYYCVRHGNFGNSYVSWFAYWGQGTLVTVSS (SEQ ID NO: 723) |
| VH | EVQLVESGGGLVQPGGSLRLSCAASGFTFNTYAMNWVRQAPGKGLEWVGRIRSKYNNYATYYADSVKGRFTI |
| | SRDDSKNTLYLQMNSLRSEDTAVYYCVRHGNFGNSYVSWFAYWGQGTLVTVSS (SEQ ID NO: 724) |
| VH | EVQLVESGGGLVQPGGSLRLSCAASGFTFNTYAMNWVRQAPGKGLEWVGRIRSKYNNYATYYADSVKGRFTI |
| | SRDDSKNTLYLQMNSLRAEDTAVYYCARHGNFGNSYVSWFAYWGQGTLVTVSS (SEQ ID NO: 725) |
| VH | EVQLVESGGGLVQPGGSLRLSCAASGFTFNTYAMNWVRQAPGKGLEWVGRIRSKYNNYATYYADSVKGRFTI |
| | SRDDSKNTLYLQMNSLRAEDTAVYYCTRHGNFGNSYVSWFAYWGQGTLVTVSS (SEQ ID NO: 726) |
| VH | EVQLVESGGGLVQPGGSLRLSCAASGFTFNTYAMNWVRQAPGKGLEWVGRIRSKYNNYATYYADSVKGRFTI |
| | SRDDSKNTLYLQMNSLRAEDTAVYYCVRHGNFGDSYVSWFAYWGQGTLVTVSS (SEQ ID NO: 727) |
| VH | EVQLVESGGGLVQPGGSLRLSCAASGFTFNTYAMNWVRQAPGKGLEWVGRIRSKYNNYATYYADSVKGRFTI |
| | SRDDSKNTLYLQMNSLRAEDTAVYYCVRHGNFGQSYVSWFAYWGQGTLVTVSS (SEQ ID NO: 728) |
| VH | EVQLVESGGGLVQPGGSLRLSCAASGFTFNTYAMNWVRQAPGKGLEWVGRIRSKYNNYATYYADSVKGRFTI |
| | SRDDSKNTLYLQMNSLRAEDTAVYYCVRHGNFGNTYVSWFAYWGQGTLVTVSS (SEQ ID NO: 729) |
| VH | EVQLVESGGGLVQPGGSLRLSCAASGFTFNTYAMNWVRQAPGKGLEWVGRIRSKYNNYATYYADSVKGRFTI |
| | SRDDSKNTLYLQMNSLRAEDTAVYYCVRHGNFGNSYVSWFDYWGQGTLVTVSS (SEQ ID NO: 730) |
| VH | EVQLVESGGGLVQPGGSLRLSCAASGFTFNTYAMNWVRQAPGKGLEWVGRIRSKYNNYATYYADSVKGRFTI |
| | SRDDSKNTLYLQMNSLRAEDTAVYYCVRHGNFGNSYVSWFAYWGQGTTVTVSS (SEQ ID NO: 731) |
| VH | EVQLVESGGGLVQPGGSLRLSCAASGFTFNTYAMNWVRQAPGKSLEWVGRIRSKYNNYATYYADSVKGRFTI |
| | SRDDSKNTLYLQMNSLRAEDTAVYYCVRHGNFGNSYVSWFAYWGQGTLVTVSS (SEQ ID NO: 732) |
| VH | EVQLVESGGGLVQPGGSLRLSCAASGFTFNTYAMNWVRQAPGKGLEWVGRIRSKYNNYATYYADSVKGRFTI |
| | SRDDSKNTLYLQMNSLRAEDTATYYCVRHGNFGNSYVSWFAYWGQGTLVTVSS (SEQ ID NO: 733) |
| VH | EVQLVESGGGLVQPGGSLRLSCAASGFTFSTYAMNWVRQAPGKGLEWVGRIRSKYNNYATYYADSVKGRFTI |
| | SRDDSKNTLYLQMNSLRAEDTAVYYCVRHGNFGDSYVSWFAYWGQGTLVTVSS (SEQ ID NO: 734) |
| VH | EVQLVESGGGLVQPGGSLRLSCAASGFTFSTYAMSWVRQAPGKGLEWVGRIRSKYNNYATYYADSVKGRFTI |
| | SRDDSKNTLYLQMNSLRAEDTAVYYCVRHGNFGDSYVSWFAYWGQGTLVTVSS (SEQ ID NO: 735) |
| VH | EVQLVESGGGLVQPGGSLRLSCAASGFTFSTYAMNWVRQAPGKGLEWVGRIRSKANNYATYYADSVKGRFTI |
| | SRDDSKNTLYLQMNSLRAEDTAVYYCVRHGNFGDSYVSWFAYWGQGTLVTVSS (SEQ ID NO: 736) |
| VH | EVQLVESGGGLVQPGGSLRLSCAASGFTFSTYAMNWVRQAPGKGLEWVGRIRSKYNNYATYYADSVKGRFTI |
| | SRDDSKNTLYLQMNSLRAEDTAVYYCVRHGNFGDSYVSWFDYWGQGTLVTVSS (SEQ ID NO: 737) |
| VH | EVQLVESGGGLVQPGGSLRLSCAASGFTFSTYAMSWVRQAPGKGLEWVGRIRSKANNYATYYADSVKGRFTI |
| | SRDDSKNTLYLQMNSLRAEDTAVYYCVRHGNFGDSYVSWFDYWGQGTLVTVSS (SEQ ID NO: 738) |
| VH | EVQLVESGGEVKKPGESLRLSCAASGFTFNTYAMNWVRQAPGKGLEWVGRIRSKYNNYATYYADSVKGRFTI |
| | SRDDSKNTLYLQMNSLRAEDTAVYYCVRHGNFGNSYVSWFAYWGQGTLVTVSS (SEQ ID NO: 739) |
| VH | EVQLVESGGGLVQPGGSLRLSCAASGFTFNTYAMNWVRQAPGKGLEWVGRIRSNGGSTYYADSVKGRFTISR |
| | DDSKNTLYLQMNSLRAEDTAVYYCVRHGNFGNSYVSWFAYWGQGTLVTVSS (SEQ ID NO: 740) |
| VH | EVQLVESGGGLVQPGGSLRLSCAASGFTFNTYAMNWVRKAPGKGLEWVGRIRSKYNNYATYYADSVKGRFTI |
| | SRDDSKNTLYLQMNSLRAEDTAVYYCVRHGNFGNSYVSWFAYWGQGTLVTVSS (SEQ ID NO: 741) |
| VH | EVQLVESGGGLVQPGGSLRLSCAASGFTFSTYAMNWVRKAPGKGLEWVGRIRSKYNNYATYYADSVKGRFTI |
| | SRDDSKNTLYLQMNSLRAEDTAVYYCVRHGNFGNSYVSWFAYWGQGTLVTVSS (SEQ ID NO: 742) |
| VH | EVQLVESGGGLVQPGGSLRLSCAASGFTFSTYAMNWVRKAPGKGLEWVGRIRSKYNNYATYYADSVKGRFTI |
| | SRDDSKNTLYLQMNSLRAEDTAVYYCVRHGNFGDSYVSWFAYWGQGTLVTVSS (SEQ ID NO: 743) |
| VL | QAVVTQEPSLTVSPGGTVTLTCGSSTGAVTTSNYANWVQQKPGQAPRGLIGGTNKRAPGVPARFSGSLLGGK |
| | AALTLSGAQPEDEAEYYCALWYSNLWVFGGGTKLTVL (SEQ ID NO: 744) |
| VL | QAVVTQPPSLTVSPGGTVTLTCGSSTGAVTTSNYANWVQQKPGQAPRGLIGGTNKRAPGVPARFSGSLLGGK |
| | AALTLSGAQPEDEAEYYCALWYSNLWVFGGGTKLTVL (SEQ ID NO: 745) |
| VL | QAVVTQEPSLSVSPGGTVTLTCGSSTGAVTTSNYANWVQQKPGQAPRGLIGGTNKRAPGVPARFSGSLLGGK |
| | AALTLSGAQPEDEAEYYCALWYSNLWVFGGGTKLTVL (SEQ ID NO: 746) |
| VL | QAVVTQEPSLTVSPGATVTLTCGSSTGAVTTSNYANWVQQKPGQAPRGLIGGTNKRAPGVPARFSGSLLGGK |
| | AALTLSGAQPEDEAEYYCALWYSNLWVFGGGTKLTVL (SEQ ID NO: 747) |
| VL | QAVVTQEPSLTVSPGQTVTLTCGSSTGAVTTSNYANWVQQKPGQAPRGLIGGTNKRAPGVPARFSGSLLGGK |
| | AALTLSGAQPEDEAEYYCALWYSNLWVFGGGTKLTVL (SEQ ID NO: 748) |
| VL | QAVVTQEPSLTVSPGGTVTLTCGSSTGAVTSSNYANWVQQKPGQAPRGLIGGTNKRAPGVPARFSGSLLGGK |
| | AALTLSGAQPEDEAEYYCALWYSNLWVFGGGTKLTVL (SEQ ID NO: 749) |
| VL | QAVVTQEPSLTVSPGGTVTLTCGSSTGAVTSGHYANWVQQKPGQAPRGLIGGTNKRAPGVPARFSGSLLGGK |
| | AALTLSGAQPEDEAEYYCALWYSNLWVFGGGTKLTVL (SEQ ID NO: 750) |
| VL | QAVVTQEPSLTVSPGGTVTLTCGSSTGAVTTSNYANWVQQKPGQAPRGLIYDTNKRAPGVPARFSGSLLGGK |
| | AALTLSGAQPEDEAEYYCALWYSNLWVFGGGTKLTVL (SEQ ID NO: 751) |
| VL | QAVVTQEPSLTVSPGGTVTLTCGSSTGAVTTSNYANWVQQKPGQAPRGLIGGTNNRAPGVPARFSGSLLGGK |
| | AALTLSGAQPEDEAEYYCALWYSNLWVFGGGTKLTVL (SEQ ID NO: 752) |
| VL | QAVVTQEPSLTVSPGGTVTLTCGSSTGAVTTSNYANWVQQKPGQAPRGLIGGTNKRASGVPARFSGSLLGGK |
| | AALTLSGAQPEDEAEYYCALWYSNLWVFGGGTKLTVL (SEQ ID NO: 753) |
| VL | QAVVTQEPSLTVSPGGTVTLTCGSSTGAVTTSNYANWVQQKPGQAPRGLIGGTSNKHSWTPARFSGSLLGGK |
| | AALTLSGAQPEDEAEYYCALWYSNLWVFGGGTKLTVL (SEQ ID NO: 754) |
| VL | QAVVTQEPSLTVSPGGTVTLTCGSSTGAVTTSNYANWVQQKPGQAPRGLIGGTNKRAPGVPDRFSGSLLGGK |
| | AALTLSGAQPEDEAEYYCALWYSNLWVFGGGTKLTVL (SEQ ID NO: 755) |
| VL | QAVVTQEPSLTVSPGGTVTLTCGSSTGAVTTSNYANWVQQKPGQAPRGLIGGTNKRAPGVPARFSGSKSGGK |
| | AALTLSGAQPEDEAEYYCALWYSNLWVFGGGTKLTVL (SEQ ID NO: 756) |
| VL | QAVVTQEPSLTVSPGGTVTLTCGSSTGAVTTSNYANWVQQKPGQAPRGLIGGTNKRAPGVPARFSGSSSGGK |
| | AALTLSGAQPEDEAEYYCALWYSNLWVFGGGTKLTVL (SEQ ID NO: 757) |
| VL | QAVVTQEPSLTVSPGGTVTLTCGSSTGAVTTSNYANWVQQKPGQAPRGLIGGTNKRAPGVPARFSGSLLGGK |
| | AALTISGAQPEDEAEYYCALWYSNLWVFGGGTKLTVL (SEQ ID NO: 758) |
| VL | QAVVTQEPSLTVSPGGTVTLTCGSSTGAVTTSNYANWVQQKPGQAPRGLIGGTNKRAPGVPARFSGSLLGGK |
| | AALTLSGAQAEDEAEYYCALWYSNLWVFGGGTKLTVL (SEQ ID NO: 759) |
| VL | QAVVTQEPSLTVSPGGTVTLTCGSSTGAVTTSNYANWVQQKPGQAPRGLIGGTNKRAPGVPARFSGSLLGGK |
| | AALTLSGAQSEDEAEYYCALWYSNLWVFGGGTKLTVL (SEQ ID NO: 760) |
| VL | QAVVTQEPSLTVSPGGTVTLTCGSSTGAVTTSNYANWVQQKPGQAPRGLIGGTNKRAPGVPARFSGSLLGGK |
| | AALTLSGAQPEDEADYYCALWYSNLWVFGGGTKLTVL (SEQ ID NO: 761) |
| VL | QAVVTQEPSLTVSPGGTVTLTCGSSTGAVTTSNYANWVQQKPGQAPRGLIGGTNKRAPGVPARFSGSLLGGK |
| | AALTLSGAQPEDEAEYYCLLWYSNLWVFGGGTKLTVL (SEQ ID NO: 762) |
| VL | QAVVTQEPSLTVSPGGTVTLTCGSSTGAVTTSNYANWVQQKPGQAPRGLIGGTNKRAPGVPARFSGSLLGGK |
| | AALTLSGAQPEDEAEYYCALWYSNHWVFGGGTKLTVL (SEQ ID NO: 763) |
| VL | QAVVTQEPSLTVSPGGTVTLTCGSSTGAVTTSNYANWVQQKPGQAPRGLIGGTNKRAPGVPARFSGSLLGGK |
| | AALTLSGAQPEDEAEYYCALWYSNLWVFGGGTKLEIKGS (SEQ ID NO: 764) |
| VL | EIVMTQSPATLSLSPGERATLSCRSSTGAVTTSNYANWVQQKPGQAPRGLIGGTNKRAPGVPARFSGSGSGT |
| | DFTLTISSLQPEDFAVYYCALWYSNLWVFGGGTKVEIKGS (SEQ ID NO: 765) |
| VL | DIVMTQSPDSLAVSLGERATINCKSSTGAVTTSNYANWVQQKPGQPPKGLIGGTNKRAPGVPDRFSGSGSGT |
| | DFTLTISSLQAEDVAVYYCALWYSNLWVFGGGTKVEIKGS (SEQ ID NO: 766) |
| VL | QAVVTQEPSLTVSPGGTVTLTCGSSTGAVTTSNYANWVQQKPGQAPRGLIGGTNKRAPGVPARFSGSLLGGK |
| | AALTDSGAQPEDEADYYCALWYSNHWVFGGGTKLTVL (SEQ ID NO: 767) |
| VL | QAVVTQEPSLTVSPGGTVTLTCGSSTGAVTTSNYANWVQEKPGQAPRGLIGGTNKRAPGVPARFSGSLLGGK |
| | AALTLSGAQPEDEAEYYCALWYSNLWVFGGGTKLTVL (SEQ ID NO: 768) |
| VL | QAVVTQEPSLTVSPGGTVTLTCGSSTGAVTTSNYANWVQQKPGKAPRGLIGGTNKRAPGVPARFSGSLLGGK |
| | AALTLSGAQPEDEAEYYCALWYSNLWVFGGGTKLT (SEQ ID NO: 769) |
| VL | QAVVTQEPSLTVSPGGTVTLTCGSSTGAVTTSNYANWVQQKPGTAPRGLIGGTNKRAPGVPARFSGSLLGGK |
| | AALTLSGAQPEDEAEYYCALWYSNLWVFGGGTKLTVL (SEQ ID NO: 770) |
| VL | QAVVTQEPSLTVSPGGTVTLTCGSSTGAVTTSNYANWVQQKPGSPPRGLIGGTNKRAPGVPARFSGSLLGGK |
| | AALTLSGAQPEDEAEYYCALWYSNLWVFGGGTKLTVL (SEQ ID NO: 771) |
| VL | QAVVTQEPSLTVSPGGTVTLTCGSSTGAVTTSNYANWVQQKPGQPPRGLIGGTNKRAPGVPARFSGSLLGGK |
| | AALTLSGAQPEDEAEYYCALWYSNLWVFGGGTKLTVL (SEQ ID NO: 772) |
| VL | QAVVTQEPSLTVSPGGTVTLTCGSSTGAVTTSNYANWVQQKPGQGPRGLIGGTNKRAPGVPARFSGSLLGGK |
| | AALTLSGAQPEDEAEYYCALWYSNLWVFGGGTKLTVL (SEQ ID NO: 773) |
| VL | QAVVTQEPSLTVSPGGTVTLTCGSSTGAVTTSNYANWVQQKPGQSPRGLIGGTNKRAPGVPARFSGSLLGGK |
| | AALTLSGAQPEDEAEYYCALWYSNLWVFGGGTKLTVL (SEQ ID NO: 774) |
| VL | QAVVTQEPSLTVSPGGTVTLTCGSSTGAVTTSNYANWVQQKPGQDPRGLIGGTNKRAPGVPARFSGSLLGGK |
| | AALTLSGAQPEDEAEYYCALWYSNLWVFGGGTKLTVL (SEQ ID NO: 775) |
| VL | QAVVTQEPSLTVSPGGTVTLTCGSSTGAVTTSNYANWVQQKPGQAPRGLIGGTNKRAPGVPARFSGSLLGGK |
| | AALTISGAQPEDEADYYCALWYSNHWVFGGGTKLTVL (SEQ ID NO: 776) |
| VL | QAVVTQEPSLTVSPGGTVTLTCGSSTGAVTTSNYANWVQQKPGQAPRGLIGGTNKRAPGVPARFSGSLLGGK |
| | AALTISGAQPEDEAEYYCALWYSNHWVFGGGTKLTVL (SEQ ID NO: 777) |
| VL | QAVVTQEPSLTVSPGGTVTLTCGSSTGAVTTSNYANWVQQKPGKAPRGLIGGTNKRAPGVPARFSGSLLGGK |
| | AALTISGAQPEDEAEYYCALWYSNHWVFGGGTKLTVL (SEQ ID NO: 778) |
| VL | QAVVTQEPSLTVSPGGTVTLTCGSSTGAVTTSNYANWVQQKPGQSPRGLIGGTNKRAPGVPARFSGSLLGGK |
| | AALTISGAQPEDEAEYYCALWYSNHWVFGGGTKLTVL (SEQ ID NO: 779) |
| VL | QAVVTQEPSLTVSPGGTVTLTCGSSTGAVTTSNYANWVQQKPGKSPRGLIGGTNKRAPGVPARFSGSLLGGK |
| | AALTISGAQPEDEAEYYCALWYSNHWVFGGGTKLTVL (SEQ ID NO: 780) |
| VL | QAVVTQEPSLTVSPGGTVTLTCGSSTGAVTTSNYANWVQQKPGKAPRGLIGGTNKRAPGVPARFSGSLLGGK |
| | AALTISGAQPEDEADYYCALWYSNHWVFGGGTKLTVL (SEQ ID NO: 781) |
| VL | QAVVTQEPSLTVSPGGTVTLTCGSSTGAVTTSNYANWVQQKPGQSPRGLIGGTNKRAPGVPARFSGSLLGGK |
| | AALTISGAQPEDEADYYCALWYSNHWVFGGGTKLTVL (SEQ ID NO: 782) |
| VL | QAVVTQEPSLTVSPGGTVTLTCGSSTGAVTTSNYANWVQQKPGKSPRGLIGGTNKRAPGVPARFSGSLLGGK |
| | AALTISGAQPEDEADYYCALWYSNHWVFGGGTKLTVL (SEQ ID NO: 783) |

[0382] In some embodiments, the activatable anti-CD3ε antibody comprises or is derived from a commercially available antibody, such as, for example, an anti-CD3 antibody from Boehringer Mannheim Corp. (Indianapolis, Ind.; Cat. No. 1273 485).

[0383] In some embodiments, the activatable anti-CD3ε antibody comprises or is derived from an antibody that is manufactured, secreted or otherwise produced by a hybridoma, such as, for example, the hybridoma(s) disclosed in U.S. Pat. Nos. 4,361,549 and/or 4,658,019, and deposited at the American Type Culture Collection under Accession Number ATCC CRL 8001 OKT-3.

[0384] In some embodiments, the activatable anti-CD3ε antibody comprises or is derived from an antibody that is manufactured, secreted or otherwise produced by a hybridoma, such as, for example, the hybridoma(s) disclosed in PCT Publication No. WO 1995/16037, and deposited at the Leibniz-Institut DSMZ—Deutsche Sammlung von Mikroorganismen and Zellkulturen GmbH under Accession Number DSM ACC2152.

[0385] In some embodiments, the activatable anti-CD3ε antibody comprises or is derived from an antibody that is manufactured, secreted or otherwise produced by a hybridoma, such as, for example, the hybridoma(s) disclosed in PCT Publication No. WO 1991/01752, and deposited at the American Type Culture Collection under Accession Number HB 10166.

[0386] In some embodiments, the activatable anti-CD3ε antibody includes a CD3ε sequence shown in Table 18, a combination of VL CD3ε sequences selected from the group consisting of those combinations shown in Table 18, and/or a combination of VH CD3ε sequences selected from the group consisting of those combinations shown in Table 18. In some embodiments, the activatable anti-CD3ε antibody includes a combination of heavy chain CD3ε sequences selected from the group consisting of the combinations shown in Group R in Table 18. In some embodiments, the activatable anti-CD3ε antibody includes a combination of light chain CD3ε sequences selected from the group consisting of the combinations shown in Group R in Table 18. In some embodiments, the activatable anti-CD3ε antibody includes a combination of heavy chain CD3ε sequences selected from the group consisting of the combinations shown in Group S in Table 18. In some embodiments, the activatable anti-CD3ε antibody includes a combination of light chain CD3ε sequences selected from the group consisting of the combinations shown in Group S in Table 18. In some embodiments, the activatable anti-CD3ε antibody includes a combination of heavy chain CD3ε sequences selected from the group consisting of the combinations shown in Group T in Table 18. In some embodiments, the activatable anti-CD3ε antibody includes a combination of light chain CD3ε sequences selected from the group consisting of the combinations shown in Group T in Table 18. In some embodiments, the activatable anti-CD3ε antibody includes a combination of heavy chain CD3ε sequences selected from the group consisting of the combinations shown in Group U in Table 18. In some embodiments, the activatable anti-CD3ε antibody includes a combination of light chain CD3ε sequences selected from the group consisting of the combinations shown in Group U in Table 18. In some embodiments, the activatable anti-CD3ε antibody includes a combination of heavy chain CD3ε sequences selected from the group consisting of the combinations shown in Group V in Table 18. In some embodiments, the activatable anti-CD3ε antibody includes a combination of light chain CD3ε sequences selected from the group consisting of the combinations shown in Group V in Table 18. In some embodiments, the activatable anti-CD3ε antibody includes a combination of heavy chain CD3ε sequences selected from the group consisting of the combinations shown in Group W in Table 18. In some embodiments, the activatable anti-CD3ε antibody includes a combination of light chain CD3ε sequences selected from the group consisting of the combinations shown in Group W in Table 18. In some embodiments, the activatable anti-CD3ε antibody includes a combination of heavy chain CD3ε sequences selected from the group consisting of the combinations shown in Group X in Table 18. In some embodiments, the activatable anti-CD3ε antibody includes a combination of light chain CD3ε sequences selected from the group consisting of the combinations shown in Group X in Table 18.

TABLE 18
Additional CDR Sequences for Antibodies and Activatable Antibodiesth at BindCD38
Group R

| VH | | | VL | | |
|---|---|---|---|---|---|
| CDR1 | CDR2 | CDR3 | CDR1 | CDR2 | CDR3 |
| (SEQ ID NO:) | (SEQ ID NO:) | (SEQ ID NO:) | (SEQ ID NO:) | (SEQ ID NO:) | (SEQ ID NO:) |
| TLSSGNIENYVH | DDDKRPD | HSYVSSFNV | SFPMA | TISTSGGRTYYR | FRQYSGGFDY |
| (784) | (785) | (786) | (787) | DSVKG (788) | (789) |

Group S

| VH | | | VL | | |
|---|---|---|---|---|---|
| CDR1 | CDR2 | CDR3 | CDR1 | CDR2 | CDR3 |
| (SEQ ID NO:) | (SEQ ID NO:) | (SEQ ID NO:) | (SEQ ID NO:) | (SEQ ID NO:) | (SEQ ID NO:) |
| TLSSGNIE | DDDKRPD (785) | HSYVSSFNV | SFPMA (787) | TISTSGG | FRQYSGGFDY |
| NNYVH | | (786) | | RTYYRDS | (789) |
| (790) | | | | VKG | |
| (788) | | | | | |

Group T

| VH | | | VL | | |
|---|---|---|---|---|---|
| CDR1 | CDR2 | CDR3 | CDR1 | CDR2 | CDR3 |
| (SEQ ID NO:) | (SEQ ID NO:) | (SEQ ID NO:) | (SEQ ID NO:) | (SEQ ID NO:) | (SEQ ID NO:) |
| GFTFNTYA | IRSKYNNYAT (792) | VRHGNFGNSYV | TGAVTTSNY | GTN | ALWYSNLWV |
| (791) | | SWFAY (793) | (794) | (795) | (58) |

Group U

| VH | | | VL | | |
|---|---|---|---|---|---|
| CDR1 | CDR2 | CDR3 | CDR1 | CDR2 | CDR3 |
| (SEQ ID NO:) | (SEQ ID NO:) | (SEQ ID NO:) | (SEQ ID NO:) | (SEQ ID NO:) | (SEQ ID NO:) |
| RYTMH | YINPSRGYTNYNQKFK | YYDDHYSLDY | SASSSVSYMN | DTSKLAS | QQWSSNPFT |
| (796) | D (797) | (798) | (799) | (800) | (801) |

Group V

| VH | | | VL | | |
|---|---|---|---|---|---|
| CDR1 | CDR2 | CDR3 | CDR1 | CDR2 | CDR3 |
| (SEQ ID NO:) | (SEQ ID NO:) | (SEQ ID NO:) | (SEQ ID NO:) | (SEQ ID NO:) | (SEQ ID NO:) |
| SYGMH | VISYDGSNKYYADSVK | LSPYCTNGVCW | RASQTISNYLN | AASTLQS | QQFNSYPRT |
| (802) | G (803) | DAFDI (804) | (805) | (806) | (807) |
| DYAMS | FIRSKAYGGTTEYAAS | QLWLLQDAFDI | RASQGISNYLA | AASTLQS | QQSYSTPPT |
| (808) | VKG (809) | (810) | (811) | (806) | (812) |
| SRNWWS | DIYHSGSTNYNPSLKS | GYTSCRDAFDI | RASQGIGNYLA | WASIRES | QQYYSNPQT |
| (813) | (814) | (815) | (816) | (817) | (818) |
| GYYWS | EINHSGSTNYNPSLKS | GRGRFLGWLLG | RASQGISNYLN | DASNLET | QQSYSTPYT |
| (819) | (820) | GSNWFDP (821) | (822) | (823) | (824) |
| GYYWS | EINHSGSTNYNPSLKS | GPDRMGHGFDI | RASQSISSYLN | AASSLQS | QQSYSSP |
| (819) | (820) | (825) | (826) | (92) | (827) |
| SNSAAWN | RTYYRSKWYNDYAVSV | DRRRIAARQYY | RASQSVSSNYLA | GASSRAT | QKYNSAP |
| (828) | KS (829) | GMDV (830) | (831) | (832) | (833) |
| SYAMG | AVSGSGGSTYYADSVK | AKFLGHYYGMD | RASQSISSYLN | AASSLQS | LQHNAYPYT |
| (834) | G (835) | V (836) | (826) | (92) | (837) |
| NPRMGVS | HIFPSDAKAHSASLKS | ILGEYYPPAWF | KSSQSVLYSSNNKN | WASTRES | QQYLKIPYT |
| (838) | (839) | DP (840) | YLA (841) | (842) | (843) |

Group W

| VH | | | VL | | |
|---|---|---|---|---|---|
| CDR1 | CDR2 | CDR3 | CDR1 | CDR2 | CDR3 |
| (SEQ ID NO:) | (SEQ ID NO:) | (SEQ ID NO:) | (SEQ ID NO:) | (SEQ ID NO:) | (SEQ ID NO:) |
| IYAMN | RIRSKYNNYATYYADS | HGNFGNSYVSF | GSSTGAVTSGYYPN | GTKFLAP | ALWYSNRWV |
| (844) | VKS (845) | FAY (846) | (847) | (848) | (849) |
| KYAMN | RIRSKYNNYATYYADS | HGNFGNSYISY | RSSTGAVTSGYYPN | ATDMRPS | ALWYSNRWV |
| (850) | VKD (54) | WAY (851) | (852) | (853) | (849) |
| SYAMN | RIRSKYNNYATYYADS | HGNFGNSYLSF | GSSTGAVTSGNYPN | GTKFLAP | VLWYSNRWV |
| (854) | VKG (855) | WAY (856) | (857) | (848) | (858) |
| RYAMN | RIRSKYNNYATYYADS | HGNFGNSYLSY | | | |
| (859) | VKG (855) | FAY (860) | | | |
| VYAMN | RIRSKYNNYATYYADS | HGNFGNSYLSW | | | |
| (861) | VKK (862) | WAY (863) | | | |
| KYAMN | RIRSKYNNYATYYADS | HGNFGNSYISY | | | |
| (850) | VKS (845) | YAY (864) | | | |
| GYAMN | RIRSKYNNYATYYADS | HRNFGNSYLSW | | | |
| (865) | VKE (866) | FAY (867) | | | |
| VYAMN | RIRSKYNNYATYYADS | HGNFGNSYISW | | | |
| (861) | VKK (862) | WAY (868) | | | |
| SYAMN | RIRSKYNNYATYYADS | HGNFGNSYVSW | | | |
| (854) | VKG (855) | WAY (869) | | | |
| KYAMN | RIRSKYNNYATYYADS | HGNFGNSYISY | | | |
| (850) | VKD (54) | WAY (851) | | | |
| IYAMN | RIRSKYNNYATYYADS | HGNFGNSYLSF | | | |
| (844) | VKS (845) | FAY (846) | | | |
| KYAMN | RIRSKYNNYATYYADS | HGNFGNSYISY | | | |
| (850) | VKD (54) | WAY (851) | | | |
| SYAMN | RIRSKYNNYATYYADS | HGNFGNSYLSF | | | |
| (854) | VKG (855) | WAY (856) | | | |
| | | | GSSTGAVTSGYYPN | GTKFLAP | ALWYSNRWV |
| | | | (847) | (848) | (849) |
| | | | RSSTGAVTSGYYPN | ATDMRPS | ALWYSNRWV |
| | | | (852) | (853) | (849) |
| | | | GSSTGAVTSGNYPN | GTKFLAP | VLWYSNRWV |
| | | | (857) | (848) | (858) |

Group X

| VH | | | VL | | |
|---|---|---|---|---|---|
| CDR1 | CDR2 | CDR3 | CDR1 | CDR2 | CDR3 |
| (SEQ ID NO:) | (SEQ ID NO:) | (SEQ ID NO:) | (SEQ ID NO:) | (SEQ ID NO:) | (SEQ ID NO:) |
| GYGMH | VIWYDGSKKYYVDSVK | QMGYWHFDL | RASQSVSSYLA | DASNRAT | QQRSNWPPLT |
| (870) | G (871) | (872) | (873) | (874) | (875) |
| SYGMH | IIWYDGSKKNYADSVK | GTGYNWFDP | RASQSVSSSYLA | GASSRAT | QQYGSSPIT |
| (802) | G (872) | (873) | (874) | (832) | (875) |
| SYGMH | IIWYDGSKKNYADSVK | GTGYNWFDP | RASQGISSALA | YASSLQS | QQYYSTLTF |
| (802) | G (872) | (873) | (876) | (877) | (888) |
| SYGMH | IIWYDGSKKNYADSVK | GTGYNWFDP | RASQGISSALA | DASSLGS | QQYYSTLTF |
| (802) | G (872) | (873) | (876) | (889) | (888) |
| SYGMH | IIWYDGSKKNYADSVK | GTGYNWFDP | WASQGISSYLA | YASSLQS | QQYYSTLTF |
| (802) | G (872) | (873) | (890) | (877) | (888) |
| SYGMH | AIWYNGRKQDYADSVK | GTGYNWFDP | RASQSVSSYLA | DASNRAT | QQRSNWPWT |
| (802) | G (891) | (873) | (873) | (874) | (892) |
| SYGMH | AIWYNGRKQDYADSVK | GTGYNWFDP | RASQGISSALA | DASSLES | QQFNSYPIT |
| (802) | G (891) | (873) | (876) | (893) | (894) |

[0387] The ABs in the multispecific activatable antibodies of the disclosure specifically bind at least a mammalian target. In some embodiments, such ABs bind mammalian CD3ε. In some embodiments, such ABs bind a human target. In some embodiments, such ABs bind a non-human primate target. Also included in the disclosure are ABs that bind to the same epitope as an antibody of the disclosure and/or an activated activatable antibody described herein. Also included in the disclosure are ABs that compete with an antibody and/or an activated activatable antibody described herein for binding to a target, e.g., a human target. Also included in the disclosure are ABs that cross-compete with an antibody and/or an activated activatable antibody described herein for binding to a target, e.g., a human target.

[0388] In some embodiments, the ABs in the multispecific activatable antibodies of the disclosure specifically bind at least a CD3ε target, such as, for example, mammalian CD3ε. In some embodiments, such ABs bind mammalian CD3ε. In some embodiments, such ABs bind human CD3ε. In some embodiments, such ABs bind non-human primate CD3ε. Also included in the disclosure are ABs that bind to the same CD3ε epitope as an antibody of the disclosure and/or an activated activatable antibody described herein. Also included in the disclosure are ABs that compete with an anti-CD3ε antibody and/or an activated anti-CD3ε activatable antibody described herein for binding to a CD3ε target, e.g., human CD3ε. Also included in the disclosure are ABs that cross-compete with an anti-CD3ε antibody and/or an activated anti-CD3ε activatable antibody described herein for binding to a CD3ε target, e.g., human CD3ε.

[0389] In some embodiments, at least one of the AB of the multispecific antibody and/or multispecific activatable antibody binds Epidermal Growth Factor Receptor (EGFR). In some embodiments, the AB that binds EGFR includes one or more of the heavy chain and/or light chain sequences shown below.

C225v5 Antibody Heavy Chain Nucleotide Sequence:
(SEQ ID NO: 100)
CAGGTGCAGCTGAAACAGAGCGGCCCGGGCCTGGTGCAGCCGAGCCAGAGCCTGAGCATTACCTGCACCGTGAGCGG
CTTTAGCCTGACCAACTATGGCGTGCATTGGGTGCGCCAGAGCCCGGGCAAAGGCCTGGAATGGCTGGGCGTGATTT
GGAGCGGCGGCAACACCGATTATAACACCCCGTTTACCAGCCGCCTGAGCATTAACAAAGATAACAGCAAAAGCCAG
GTGTTTTTTAAAATGAACAGCCTGCAAAGCCAGGATACCGCGATTTATTATTGCGCGCGCGCGCTGACCTATTATGA
TTATGAATTTGCGTATTGGGGCCAGGGCACCCTGGTGACCGTGAGCGCGGCTAGCACCAAGGGCCCATCGGTCTTCC
CCCTGGCACCCTCCTCCAAGAGCACCTCTGGGGGCACAGCGGCCCTGGGCTGCCTGGTCAAGGACTACTTCCCCGAA
CCGGTGACGGTGTCGTGGAACTCAGGCGCCCTGACCAGCGGCGTGCACACCTTCCCGGCTGTCCTACAGTCCTCAGG
ACTCTACTCCCTCAGCAGCGTGGTGACCGTGCCCTCCAGCAGCTTGGGCACCCAGACCTACATCTGCAACGTGAATC
ACAAGCCCAGCAACACCAAGGTGGACAAGAAAGTTGAGCCCAAATCTTGTGACAAAACTCACACATGCCCACCGTGC
CCAGCACCTGAACTCCTGGGGGGACCGTCAGTCTTCCTCTTCCCCCCAAAACCCAAGGACACCCTCATGATCTCCCG
GACCCCTGAGGTCACATGCGTGGTGGTGGACGTGAGCCACGAAGACCCTGAGGTCAAGTTCAACTGGTACGTGGACG
GCGTGGAGGTGCATAATGCCAAGACAAAGCCGCGGGAGGAGCAGTACAACAGCACGTACCGTGTGGTCAGCGTCCTC
ACCGTCCTGCACCAGGACTGGCTGAATGGCAAGGAGTACAAGTGCAAGGTCTCCAACAAAGCCCTCCCAGCCCCCAT
CGAGAAAACCATCTCCAAAGCCAAAGGGCAGCCCCGAGAACCACAGGTGTACACCCTGCCCCCATCCCGGGATGAAC
TGACCAAGAACCAGGTCAGCCTGACCTGCCTGGTCAAAGGCTTCTATCCCAGCGACATCGCCGTGGAGTGGGAGAGC
AATGGGCAGCCGGAGAACAACTACAAGACCACGCCTCCCGTGCTGGACTCCGACGGCTCCTTCTTCCTCTACAGCAA
GCTCACCGTGGACAAGAGCAGGTGGCAGCAGGGGAACGTCTTCTCATGCTCCGTGATGCATGAGGCTCTGCACAACC
ACTACACGCAGAAGAGCCTCTCCCTGTCTCCGGGTAAATGA
C225v5 Antibody Heavy Chain Amino Acid Sequence
(SEQ ID NO: 101)
QVQLKQSGPGLVQPSQSLSITCTVSGFSLTNYGVHWVRQSPGKGLEWLGVIWSGGNTDYNTPFTSRLSINKDNSKSQ
VFFKMNSLQSQDTAIYYCARALTYYDYEFAYWGQGTLVTVSAASTKGPSVFPLAPSSKSTSGGTAALGCLVKDYFPE
PVTVSWNSGALTSGVHTFPAVLQSSGLYSLSSVVTVPSSSLGTQTYICNVNHKPSNTKVDKKVEPKSCDKTHTCPPC
PAPELLGGPSVFLFPPKPKDTLMISRTPEVTCVVVDVSHEDPEVKFNWYVDGVEVHNAKTKPREEQYNSTYRVVSVL
TVLHQDWLNGKEYKCKVSNKALPAPIEKTISKAKGQPREPQVYTLPPSRDELTKNQVSLTCLVKGFYPSDIAVEWES
NGQPENNYKTTPPVLDSDGSFFLYSKLTVDKSRWQQGNVFSCSVMHEALHNHYTQKSLSLSPGK*
C225v5 Antibody Light Chain Nucleotide Sequence:
(SEQ ID NO: 102)
CAGATCTTGCTGACCCAGAGCCCGGTGATTCTGAGCGTGAGCCCGGGCGAACGTGTGAGCTTTAGCTGCCGCGCGAG
CCAGAGCATTGGCACCAACATTCATTGGTATCAGCAGCGCACCAACGGCAGCCCGCGCCTGCTGATTAAATATGCGA
GCGAAAGCATTAGCGGCATTCCGAGCCGCTTTAGCGGCAGCGGCAGCGGCACCGATTTTACCCTGAGCATTAACAGC
GTGGAAAGCGAAGATATTGCGGATTATTATTGCCAGCAGAACAACAACTGGCCGACCACCTTTGGCGCGGGCACCAA
ACTGGAACTGAAACGTACGGTGGCTGCACCATCTGTCTTCATCTTCCCGCCATCTGATGAGCAGTTGAAATCTGGAA
CTGCCTCTGTTGTGTGCCTGCTGAATAACTTCTATCCCAGAGAGGCCAAAGTACAGTGGAAGGTGGATAACGCCCTC
CAATCGGGTAACTCCCAGGAGAGTGTCACAGAGCAGGACAGCAAGGACAGCACCTACAGCCTCAGCAGCACCCTGAC
GCTGAGCAAAGCAGACTACGAGAAACACAAAGTCTACGCCTGCGAAGTCACCCATCAGGGCCTGAGCTCGCCCGTCA
CAAAGAGCTTCAACAGGGGAGAGTGTTAG
C225v5 Antibody Light Chain Amino Acid Sequence:
(SEQ ID NO: 103)
QILLTQSPVILSVSPGERVSFSCRASQSIGTNIHWYQQRTNGSPRLLIKYASESISGIPSRFSGSGSGTDFTLSINS
VESEDIADYYCQQNNNWPTTFGAGTKLELKRTVAAPSVFIFPPSDEQLKSGTASVVCLLNNFYPREAKVQWKVDNAL
QSGNSQESVTEQDSKDSTYSLSSTLTLSKADYEKHKVYACEVTHQGLSSPVTKSFNRGEC*
C225v4 Antibody Heavy Chain Nucleotide Sequence:
(SEQ ID NO: 104)
CAGGTGCAGCTGAAACAGAGCGGCCCGGGCCTGGTGCAGCCGAGCCAGAGCCTGAGCATTACCTGCACCGTGAGCGG
CTTTAGCCTGACCAACTATGGCGTGCATTGGGTGCGCCAGAGCCCGGGCAAAGGCCTGGAATGGCTGGGCGTGATTT
GGAGCGGCGGCAACACCGATTATAACACCCCGTTTACCAGCCGCCTGAGCATTAACAAAGATAACAGCAAAAGCCAG
GTGTTTTTTAAAATGAACAGCCTGCAAAGCAACGATACCGCGATTTATTATTGCGCGCGCGCGCTGACCTATTATGA
TTATGAATTTGCGTATTGGGGCCAGGGCACCCTGGTGACCGTGAGCGCGGCTAGCACCAAGGGCCCATCGGTCTTCC
CCCTGGCACCCTCCTCCAAGAGCACCTCTGGGGGCACAGCGGCCCTGGGCTGCCTGGTCAAGGACTACTTCCCCGAA
CCGGTGACGGTGTCGTGGAACTCAGGCGCCCTGACCAGCGGCGTGCACACCTTCCCGGCTGTCCTACAGTCCTCAGG
ACTCTACTCCCTCAGCAGCGTGGTGACCGTGCCCTCCAGCAGCTTGGGCACCCAGACCTACATCTGCAACGTGAATC
ACAAGCCCAGCAACACCAAGGTGGACAAGAAAGTTGAGCCCAAATCTTGTGACAAAACTCACACATGCCCACCGTGC
CCAGCACCTGAACTCCTGGGGGGACCGTCAGTCTTCCTCTTCCCCCCAAAACCCAAGGACACCCTCATGATCTCCCG
GACCCCTGAGGTCACATGCGTGGTGGTGGACGTGAGCCACGAAGACCCTGAGGTCAAGTTCAACTGGTACGTGGACG
GCGTGGAGGTGCATAATGCCAAGACAAAGCCGCGGGAGGAGCAGTACAACAGCACGTACCGTGTGGTCAGCGTCCTC
ACCGTCCTGCACCAGGACTGGCTGAATGGCAAGGAGTACAAGTGCAAGGTCTCCAACAAAGCCCTCCCAGCCCCCAT
CGAGAAAACCATCTCCAAAGCCAAAGGGCAGCCCCGAGAACCACAGGTGTACACCCTGCCCCCATCCCGGGATGAAC
TGACCAAGAACCAGGTCAGCCTGACCTGCCTGGTCAAAGGCTTCTATCCCAGCGACATCGCCGTGGAGTGGGAGAGC
AATGGGCAGCCGGAGAACAACTACAAGACCACGCCTCCCGTGCTGGACTCCGACGGCTCCTTCTTCCTCTACAGCAA
GCTCACCGTGGACAAGAGCAGGTGGCAGCAGGGGAACGTCTTCTCATGCTCCGTGATGCATGAGGCTCTGCACAACC
ACTACACGCAGAAGAGCCTCTCCCTGTCTCCGGGTAAATGA
C225v4 Antibody Heavy Chain Amino Acid Sequence:
(SEQ ID NO: 105)
QVQLKQSGPGLVQPSQSLSITCTVSGFSLTNYGVHWVRQSPGKGLEWLGVIWSGGNTDYNTPFTSRLSINKDNSKSQ
VFFKMNSLQSNDTAIYYCARALTYYDYEFAYWGQGTLVTVSAASTKGPSVFPLAPSSKSTSGGTAALGCLVKDYFPE
PVTVSWNSGALTSGVHTFPAVLQSSGLYSLSSVVTVPSSSLGTQTYICNVNHKPSNTKVDKKVEPKSCDKTHTCPPC
PAPELLGGPSVFLFPPKPKDTLMISRTPEVTCVVVDVSHEDPEVKFNWYVDGVEVHNAKTKPREEQYNSTYRVVSVL
TVLHQDWLNGKEYKCKVSNKALPAPIEKTISKAKGQPREPQVYTLPPSRDELTKNQVSLTCLVKGFYPSDIAVEWES
NGQPENNYKTTPPVLDSDGSFFLYSKLTVDKSRWQQGNVFSCSVMHEALHNHYTQKSLSLSPGK*
C225v6 Antibody Heavy Chain Nucleotide Sequence:
(SEQ ID NO: 106)
CAGGTGCAGCTGAAACAGAGCGGCCCGGGCCTGGTGCAGCCGAGCCAGAGCCTGAGCATTACCTGCACCGTGAGCGG
CTTTAGCCTGACCAACTATGGCGTGCATTGGGTGCGCCAGAGCCCGGGCAAAGGCCTGGAATGGCTGGGCGTGATTT
GGAGCGGCGGCAACACCGATTATAACACCCCGTTTACCAGCCGCCTGAGCATTAACAAAGATAACAGCAAAAGCCAG
GTGTTTTTTAAAATGAACAGCCTGCAAAGCCAGGATACCGCGATTTATTATTGCGCGCGCGCGCTGACCTATTATGA
TTATGAATTTGCGTATTGGGGCCAGGGCACCCTGGTGACCGTGAGCGCGGCTAGCACCAAGGGCCCATCGGTCTTCC
CCCTGGCACCCTCCTCCAAGAGCACCTCTGGGGGCACAGCGGCCCTGGGCTGCCTGGTCAAGGACTACTTCCCCGAA
CCGGTGACGGTGTCGTGGAACTCAGGCGCCCTGACCAGCGGCGTGCACACCTTCCCGGCTGTCCTACAGTCCTCAGG
ACTCTACTCCCTCAGCAGCGTGGTGACCGTGCCCTCCAGCAGCTTGGGCACCCAGACCTACATCTGCAACGTGAATC
ACAAGCCCAGCAACACCAAGGTGGACAAGAAAGTTGAGCCCAAATCTTGTGACAAAACTCACACATGCCCACCGTGC
CCAGCACCTGAACTCCTGGGGGGACCGTCAGTCTTCCTCTTCCCCCCAAAACCCAAGGACACCCTCATGATCTCCCG
GACCCCTGAGGTCACATGCGTGGTGGTGGACGTGAGCCACGAAGACCCTGAGGTCAAGTTCAACTGGTACGTGGACG
GCGTGGAGGTGCATAATGCCAAGACAAAGCCGCGGGAGGAGCAGTACGCCAGCACGTACCGTGTGGTCAGCGTCCTC
ACCGTCCTGCACCAGGACTGGCTGAATGGCAAGGAGTACAAGTGCAAGGTCTCCAACAAAGCCCTCCCAGCCCCCAT
CGAGAAAACCATCTCCAAAGCCAAAGGGCAGCCCCGAGAACCACAGGTGTACACCCTGCCCCCATCCCGGGATGAAC
TGACCAAGAACCAGGTCAGCCTGACCTGCCTGGTCAAAGGCTTCTATCCCAGCGACATCGCCGTGGAGTGGGAGAGC
AATGGGCAGCCGGAGAACAACTACAAGACCACGCCTCCCGTGCTGGACTCCGACGGCTCCTTCTTCCTCTACAGCAA
GCTCACCGTGGACAAGAGCAGGTGGCAGCAGGGGAACGTCTTCTCATGCTCCGTGATGCATGAGGCTCTGCACAACC
ACTACACGCAGAAGAGCCTCTCCCTGTCTCCGGGTAAATGA]
C225v6 Antibody Heavy Chain Amino Acid Sequence
(SEQ ID NO: 107)
QVQLKQSGPGLVQPSQSLSITCTVSGFSLTNYGVHWVRQSPGKGLEWLGVIWSGGNTDYNTPFTSRLSINKDNSKSQ
VFFKMNSLQSQDTAIYYCARALTYYDYEFAYWGQGTLVTVSAASTKGPSVFPLAPSSKSTSGGTAALGCLVKDYFPE
PVTVSWNSGALTSGVHTFPAVLQSSGLYSLSSVVTVPSSSLGTQTYICNVNHKPSNTKVDKKVEPKSCDKTHTCPPC
PAPELLGGPSVFLFPPKPKDTLMISRTPEVTCVVVDVSHEDPEVKFNWYVDGVEVHNAKTKPREEQYASTYRVVSVL
TVLHQDWLNGKEYKCKVSNKALPAPIEKTISKAKGQPREPQVYTLPPSRDELTKNQVSLTCLVKGFYPSDIAVEWES
NGQPENNYKTTPPVLDSDGSFFLYSKLTVDKSRWQQGNVFSCSVMHEALHNHYTQKSLSLSPGK*
C225Antibody Heavy Chain Amino Acid Sequence
(SEQ ID NO: 523)
QVQLKQSGPGLVQPSQSLSITCTVSGFSLTNYGVHWVRQSPGKGLEWLGVIWSGGNTDYNTPFTSRLSINKDNSKSQ
VFFKMNSLQSQDTAIYYCARALTYYDYEFAYWGQGTLVTVSAASTKGPSVFPLAPSSKSTSGGTAALGCLVKDYFPE
PVTVSWNSGALTSGVHTFPAVLQSSGLYSLSSVVTVPSSSLGTQTYICNVNHKPSNTKVDKKVEPKSCDKTHTCPPC
PAPELLGGPSVFLFPPKPKDTLMISRTPEVTCVVVDVSHEDPEVKFNWYVDGVEVHNAKTKPREEQYQSTYRVVSVL
TVLHQDWLNGKEYKCKVSNKALPAPIEKTISKAKGQPREPQVYTLPPSREEMTKNQVSLTCLVKGFYPSDIAVEWES
NGQPENNYKTTPPVLDSDGSFFLYSKLTVDKSRWQQGNVFSCSVMHEALHNHYTQKSLSLSPGK*

[0390] In some embodiments, at least one of the AB of the multispecific antibody and/or multispecific activatable antibody binds interleukin 6 receptor (IL-6R). In some embodiments, the AB that binds IL-6R includes one or more of the heavy chain and/or light chain sequences shown below.

Av1 Antibody Heavy Chain Amino Acid Sequence:
(SEQ ID NO: 108)
QVQLQESGPGLVRPSQTLSLTCTVSGYSITSDHAWSWVRQPPGRGLEWIGYISYSGITTYNPSLKSRVTISRDNSKN
TLYLQMNSLRAEDTAVYYCARSLARTTAMDYWGQGSLVTVSSASTKGPSVFPLAPSSKSTSGGTAALGCLVKDYFPE
PVTVSWNSGALTSGVHTFPAVLQSSGLYSLSSVVTVPSSSLGTQTYICNVNHKPSNTKVDKKVEPKSCDKTHTCPPC
PAPELLGGPSVFLFPPKPKDTLMISRTPEVTCVVVDVSHEDPEVKFNWYVDGVEVHNAKTKPREEQYNSTYRVVSVL
TVLHQDWLNGKEYKCKVSNKALPAPIEKTISKAKGQPREPQVYTLPPSREEMTKNQVSLTCLVKGFYPSDIAVEWES
NGQPENNYKTTPPVLDSDGSFFLYSKLTVDKSRWQQGNVFSCSVMHEALHNHYTQKSLSLSPGK
Av1 Antibody Light Chain Amino Acid Sequence:
(SEQ ID NO: 109)
[sequence omitted]

[0391] In some embodiments, the AB binds a Jagged target, e.g., Jagged 1, Jagged 2 or both Jagged 1 and Jagged 2. In some embodiments, the AB that binds a Jagged target includes one or more of the heavy chain and/or light chain sequences shown below.

4D11 Light Chain sequence:
(SEQ ID NO: 110)
DIQMTQSPSSLSASVGDRVTITCRASQSISSYLNWYQQKPGKAPKLLIYAASSLQSGVPSRFSGSGSGTDFTLTISS
LQPEDFATYYCQQTVVAPPLFGQGTKVEIKRTVAAPSVFIFPPSDEQLKSGTASVVCLLNNFYPREAKVQWKVDNAL
QSGNSQESVTEQDSKDSTYSLSSTLTLSKADYEKHKVYACEVTHQGLSSPVTKSFNRGEC
4D11 Heavy Chain sequence:
(SEQ ID NO: 111)
EVQLLESGGGLVQPGGSLRLSCAASGFTFSSYAMSWVRQAPGKGLEWVSSIDPEGRQTYYADSVKGRFTISRDNSKN
TLYLQMNSLRAEDTAVYYCAKDIGGRSAFDYWGQGTLVTVSSASTKGPSVFPLAPSSKSTSGGTAALGCLVKDYFPE
PVTVSWNSGALTSGVHTFPAVLQSSGLYSLSSVVTVPSSSLGTQTYICNVNHKPSNTKVDKKVEPKSCDKTHTCPPC
PAPELLGGPSVFLFPPKPKDTLMISRTPEVTCVVVDVSHEDPEVKFNWYVDGVEVHNAKTKPREEQYNSTYRVVSVL
TVLHQDWLNGKEYKCKVSNKALPAPIEKTISKAKGQPREPQVYTLPPSREEMTKNQVSLTCLVKGFYPSDIAVEWES
NGQPENNYKTTPPVLDSDGSFFLYSKLTVDKSRWQQGNVFSCSVMHEALHNHYTQKSLSLSPGK
4D11v2 Heavy Chain sequence
(SEQ ID NO: 112)
EVHLLESGGGLVQPGGSLRLSCAASGFTFSSYAMSWVRQAPGKGLEWVSSIDPEGRQTYYADSVKGRFTISRDNSKN
TLYLQMNSLRAEDTAVYYCAKDIGGRSAFDYWGQGTLVTVSSASTKGPSVFPLAPSSKSTSGGTAALGCLVKDYFPE
PVTVSWNSGALTSGVHTFPAVLQSSGLYSLSSVVTVPSSSLGTQTYICNVNHKPSNTKVDKKVEPKSCDKTHTCPPC
PAPELLGGPSVFLFPPKPKDTLMISRTPEVTCVVVDVSHEDPEVKFNWYVDGVEVHNAKTKPREEQYNSTYRVVSVL
TVLHQDWLNGKEYKCKVSNKALPAPIEKTISKAKGQPREPQVYTLPPSREEMTKNQVSLTCLVKGFYPSDIAVEWES
NGQPENNYKTTPPVLDSDGSFFLYSKLTVDKSRWQQGNVFSCSVMHEALHNHYTQKSLSLSPGK
4D11v2 Light Chain Sequence
(SEQ ID NO: 113)
DIQMTQSPSSLSASVGDRVTITCRASQSISSYLNWYQQKPGKAPKLLIYAASSLQSGVPSRFSGSGSGTDFTLTISS
LQPEDFATYYCQQTVVAPPLFGQGTKVEIKRTVAAPSVFIFPPSDEQLKSGTASVVCLLNNFYPREAKVQWKVDNAL
QSGNSQESVTEQDSKDSTYSLSSTLTLXKADYEKHKVYACEVTHQGLSSPVTKSFNRGEC

[0392] In some embodiments, at least one of the AB of the multispecific antibody and/or multispecific activatable antibody a Jagged target and includes one or more of the variable heavy chain and/or variable light chain sequences shown below.

Variable Light Chain Amino Sequence Lc4
(SEQ ID NO: 114)
DIQMTQSPSSLSASVGDRVTITCRASQSISSYLNWYQQKPGKAPKLLIYAASSLQSGVPSRFSGSGSGTDFTLTISS
LQPEDFATYYCQQSVVAPLTFGQGTKVEIKR
Variable Heavy Chain Amino Sequence Hc4
(SEQ ID NO: 115)
EVQLLESGGGLVQPGGSLRLSCAASGFTFSSYAMSWVRQAPGKGLEWVSSIEQMGWQTYYADSVKGRFTISRDNSKN
TLYLQMNSLRAEDTAVYYCAKDIGGRSAFDYWGQGTLVTVSS
Variable Light Chain Amino Sequence Lc5
(SEQ ID NO: 116)
DIQMTQSPSSLSASVGDRVTITCRASQSISSYLNWYQQKPGKAPKLLIYAASSLQSGVPSRFSGSGSGTDFTLTISS
LQPEDFATYYCQQSVVAPLTFGQGTKVEIKR
Variable Heavy Chain Amino Sequence Hc5
(SEQ ID NO: 117)
EVQLLESGGGLVQPGGSLRLSCAASGFTFSSYAMSWVRQAPGKGLEWVSSIEQMGWQTYYADSVKGRFTISRDNSKN
TLYLQMNSLRAEDTAVYYCAKSPPYHGQFDYWGQGTLVTVSS
Variable Light Chain Amino Sequence Lc7
(SEQ ID NO: 118)
DIQMTQSPSSLSASVGDRVTITCRASQSISSYLNWYQQKPGKAPKLLIYAASSLQSGVPSRFSGSGSGTDFTLTISS
LQPEDFATYYCQQSVVAPLTFGQGTKVEIKR
Variable Heavy Chain Amino Sequence Hc7
(SEQ ID NO: 119)
EVQLLESGGGLVQPGGSLRLSCAASGFTFSSYAMSWVRQAPGKGLEWVSSIEQMGWQTYYADSVKGRFTISRDNSKN
TLYLQMNSLRAEDTAVYYCAKSPPFFGQFDYWGQGTLVTVSS
Variable Light Chain Amino Sequence Lc8
(SEQ ID NO: 120)
DIQMTQSPSSLSASVGDRVTITCRASQSISSYLNWYQQKPGKAPKLLIYAASSLQSGVPSRFSGSGSGTDFTLTISS
LQPEDFATYYCQQSVVAPLTFGQGTKVEIKR
Variable Heavy Chain Amino Sequence Hc8
(SEQ ID NO: 121)
EVQLLESGGGLVQPGGSLRLSCAASGFTFSSYAMSWVRQAPGKGLEWVSSIEQMGWQTYYADSVKGRFTISRDNSKN
TLYLQMNSLRAEDTAVYYCAKHIGRTNPFDYWGQGTLVTVSS
Variable Light Chain Amino Sequence Lc13
(SEQ ID NO: 122)
DIQMTQSPSSLSASVGDRVTITCRASQSISSYLNWYQQKPGKAPKLLIYAASSLQSGVPSRFSGSGSGTDFTLTISS
LQPEDFATYYCQQSVVAPLTFGQGTKVEIKR
Variable Heavy Chain Amino Sequence Hc13
(SEQ ID NO: 123)
EVQLLESGGGLVQPGGSLRLSCAASGFTFSSYAMSWVRQAPGKGLEWVSSIEQMGWQTEYADSVKGRFTISRDNSKN
TLYLQMNSLRAEDTAVYYCAKSAAAFDYWGQGTLVTVSS
Variable Light Chain Amino Sequence Lc16
(SEQ ID NO: 124)
DIQMTQSPSSLSASVGDRVTITCRASQSISSYLNWYQQKPGKAPKLLIYAASSLQSGVPSRFSGSGSGTDFTLTISS
LQPEDFATYYCQQSVVAPLTFGQGTKVEIKR
Variable Heavy Chain Amino Sequence Hc16
(SEQ ID NO: 125)
EVQLLESGGGLVQPGGSLRLSCAASGFTFSSYAMSWVRQAPGKGLEWVSSIEQMGWQTYYADSVKGRFTISRDNSKN
TLYLQMNSLRAEDTAVYYCAKSPPYYGQFDYWGQGTLVTVSS
Variable Light Chain Amino Sequence Lc19
(SEQ ID NO: 126)
DIQMTQSPSSLSASVGDRVTITCRASQSISSYLNWYQQKPGKAPKLLIYAASSLQSGVPSRFSGSGSGTDFTLTISS
LQPEDFATYYCQQSVVAPLTFGQGTKVEIKR
Variable Heavy Chain Amino Sequence Hc19
(SEQ ID NO: 127)
EVQLLESGGGLVQPGGSLRLSCAASGFTFSSYAMSWVRQAPGKGLEWVSSIEQMGWQTYYADSVKGRFTISRDNSKN
TLYLQMNSLRAEDTAVYYCAKSPPFFGQFDYWGQGTLVTVSS
Variable Light Chain Amino Sequence Lc21
(SEQ ID NO: 128)
DIQMTQSPSSLSASVGDRVTITCRASQSISSYLNWYQQKPGKAPKLLIYAASSLQSGVPSRFSGSGSGTDFTLTISS
LQPEDFATYYCQQSVVAPLTFGQGTKVEIKR
Variable Heavy Chain Amino Sequence Hc21
(SEQ ID NO: 129)
EVQLLESGGGLVQPGGSLRLSCAASGFTFSSYAMSWVRQAPGKGLEWVSSIEQMGWQTYYADSVKGRFTISRDNSKN
TLYLQMNSLRAEDTAVYYCAKDIGGRSAFDYWGQGTLVTVSS
Variable Light Chain Amino Sequence Lc24
(SEQ ID NO: 130)
DIQMTQSPSSLSASVGDRVTITCRASQSISSYLNWYQQKPGKAPKLLIYAASSLQSGVPSRFSGSGSGTDFTLTISS
LQPEDFATYYCQQSVVAPLTFGQGTKVEIKR
Variable Heavy Chain Amino Sequence Hc24
(SEQ ID NO: 131)
EVQLLESGGGLVQPGGSLRLSCAASGFTFSSYAMSWVRQAPGKGLEWVSSIEEMGWQTLYADSVKGRFTISRDNSKN
TLYLQMNSLRAEDTAVYYCAKSAAAFDYWGQGTLVTVSS
Variable Light Chain Amino Sequence Lc26
(SEQ ID NO: 132)
DIQMTQSPSSLSASVGDRVTITCRASQSISSYLNWYQQKPGKAPKLLIYAASSLQSGVPSRFSGSGSGTDFTLTISS
LQPEDFATYYCQQSVVAPLTFGQGTKVEIKR
Variable Heavy Chain Amino Sequence Hc26
(SEQ ID NO: 133)
EVQLLESGGGLVQPGGSLRLSCAASGFTFSSYAMSWVRQAPGKGLEWVSSIEQMGWQTYYADSVKGRFTISRDNSKN
TLYLQMNSLRAEDTAVYYCAKDIGGRSAFDYWGQGTLVTVSS
Variable Light Chain Amino Sequence Lc27
(SEQ ID NO: 134)
DIQMTQSPSSLSASVGDRVTITCRASQSISSYLNWYQQKPGKAPKLLIYAASSLQSGVPSRFSGSGSGTDFTLTISS
LQPEDFATYYCQQSVVAPLTFGQGTKVEIKR
Variable Heavy Chain Amino Sequence Hc27
(SEQ ID NO: 135)
EVQLLESGGGLVQPGGSLRLSCAASGFTFSSYAMSWVRQAPGKGLEWVSSIEQMGWQTYYADSVKGRFTISRDNSKN
TLYLQMNSLRAEDTAVYYCAKSPPFYGQFDYWGQGTLVTVSS
Variable Light Chain Amino Sequence Lc28
(SEQ ID NO: 136)
DIQMTQSPSSLSASVGDRVTITCRASQSISSYLNWYQQKPGKAPKLLIYAASSLQSGVPSRFSGSGSGTDFTLTISS
LQPEDFATYYCQQSVVAPLTFGQGTKVEIKR
Variable Heavy Chain Amino Sequence Hc28
(SEQ ID NO: 137)
EVQLLESGGGLVQPGGSLRLSCAASGFTFSSYAMSWVRQAPGKGLEWVSSIEQMGWQTYYADSVKGRFTISRDNSKN
TLYLQMNSLRAEDTAVYYCAKSPPFFGQFDYWGQGTLVTVSS
Variable Light Chain Amino Sequence Lc30
(SEQ ID NO: 138)
DIQMTQSPSSLSASVGDRVTITCRASQSISSYLNWYQQKPGKAPKLLIYAASSLQSGVPSRFSGSGSGTDFTLTISS
LQPEDFATYYCQQSVVAPLTFGQGTKVEIKR
Variable Heavy Chain Amino Sequence Hc30
(SEQ ID NO: 139)
EVQLLESGGGLVQPGGSLRLSCAASGFTFSSYAMSWVRQAPGKGLEWVSSIEEMGWQTLYADSVKGRFTISRDNSKN
TLYLQMNSLRAEDTAVYYAKSAAAFDYWGQGTLVTVSS
Variable Light Chain Amino Sequence Lc31
(SEQ ID NO: 140)
DIQMTQSPSSLSASVGDRVTITCRASQSISSYLNWYQQKPGKAPKLLIYAASSLQSGVPSRFSGSGSGTDFTLTISS
LQPEDFATYYCQQSVVAPLTFGQGTKVEIKR
Variable Heavy Chain Amino Sequence Hc31
(SEQ ID NO: 141)
EVQLLESGGGLVQPGGSLRLSCAASGFTFSSYAMSWVRQAPGKGLEWVSSIEQMGWQTYYADSVKGRFTISRDNSKN
TLYLQMNSLRAEDTAVYYCAKDIGGRSAFDYWGQGTLVTVSS
Variable Light Chain Amino Sequence Lc32
(SEQ ID NO: 142)
DIQMTQSPSSLSASVGDRVTITCRASQSISSYLNWYQQKPGKAPKLLIYAASSLQSGVPSRFSGSGSGTDFTLTISS
LQPEDFATYYCQQSVVAPLTFGQGTKVEIKR
Variable Heavy Chain Amino Sequence Hc32
(SEQ ID NO: 143)
EVQLLESGGGLVQPGGSLRLSCAASGFTFSSYAMSWVRQAPGKGLEWVSSIDPEGWQTYYADSVKGRFTISRDNSKN
TLYLQMNSLRAEDTAVYYCAKSAAAFDYWGQGTLVTVSS
Variable Light Chain Amino Sequence Lc37
(SEQ ID NO: 144)
DIQMTQSPSSLSASVGDRVTITCRASQSISSYLNWYQQKPGKAPKLLIYAASSLQSGVPSRFSGSGSGTDFTLTISS
LQPEDFATYYCQQSVVAPLTFGQGTKVEIKR
Variable Heavy Chain Amino Sequence Hc37
(SEQ ID NO: 145)
EVQLLESGGGLVQPGGSLRLSCAASGFTFSSYAMSWVRQAPGKGLEWVSSIEQMGWQTYYADSVKGRFTISRDNSKN
TLYLQMNSLRAEDTAVYYCAKSPPHNGQFDYWGQGTLVTVSS
Variable Light Chain Amino Sequence Lc39
(SEQ ID NO: 146)
DIQMTQSPSSLSASVGDRVTITCRASQSISSYLNWYQQKPGKAPKLLIYAASSLQSGVPSRFSGSGSGTDFTLTISS
LQPEDFATYYCQQSVVAPLTFGQGTKVEIKR
Variable Heavy Chain Amino Sequence Hc39
(SEQ ID NO: 147)
EVQLLESGGGLVQPGGSLRLSCAASGFTFSSYAMSWVRQAPGKGLEWVSSIEQMGWQTEYADSVKGRFTISRDNSKN
TLYLQMNSLRAEDTAVYYCAKSAAAFDYWGQGTLVTVSS
Variable Light Chain Amino Sequence Lc40
(SEQ ID NO: 148)
DIQMTQSPSSLSASVGDRVTITCRASQSISSYLNWYQQKPGKAPKLLIYAASSLQSGVPSRFSGSGSGTDFTLTISS
LQPEDFATYYCQQSVVAPLTFGQGTKVEIKR
Heavy Chain Amino Sequence Hc40
(SEQ ID NO: 149)
EVQLLESGGGLVQPGGSLRLSCAASGFTFSSYAMSWVRQAPGKGLEWVSSIEQMGWQTYYADSVKGRFTISRDNSKN
TLYLQMNSLRAEDTAVYYCAKSPPFFGQFDYWGQGTLVTVSS
Variable Light Chain Amino Sequence Lc47
(SEQ ID NO: 150)
DIQMTQSPSSLSASVGDRVTITCRASQSISSYLNWYQQKPGKAPKLLIYAASSLQSGVPSRFSGSGSGTDFTLTISS
LQPEDFATYYCQQSVVAPLTFGQGTKVEIKR
Variable Heavy Chain Amino Sequence Hc47
(SEQ ID NO: 151)
EVQLLESGGGLVQPGGSLRLSCAASGFTFSSYAMSWVRQAPGKGLEWVSSIDEMGWQTEYADSVKGRFTISRDNSKN
TLYLQMNSLRAEDTAVYYCAKSAAAFDYWGQGTLVTVSS
Variable 4B2 Light Chain
(SEQ ID NO: 152)
DIQMTQSPSSLSASVGDRVTITCRASQSISSYLNWYQQKPGKAPKLLIYAASSLQSGVPSRFSGSGSGTDFTLTISS
LQPEDFATYYCQQTLDAPPQFGQGTKVEIKR
Variable 4B2 Heavy Chain
(SEQ ID NO: 153)
EVQLLESGGGLVQPGGSLRLSCAASGFTFSSYAMSWVRQAPGKGLEWVSSIEQMGWQTYYADSVKGRFTISRDNSKN
TLYLQMNSLRAEDTAVYYCAKDIGGRSAFDYWGQGTLVTVSS
Variable 4D11 Light Chain
(SEQ ID NO: 154)
DIQMTQSPSSLSASVGDRVTITCRASQSISSYLNWYQQKPGKAPKLLIYAASSLQSGVPSRFSGSGSGTDFTLTISS
LQPEDFATYYCQQTVVAPPLFGQGTKVEIKR
Variable 4D11 Heavy Chain
(SEQ ID NO: 155)
EVQLLESGGGLVQPGGSLRLSCAASGFTFSSYAMSWVRQAPGKGLEWVSSIDPEGRQTYYADSVKGRFTISRDNSKN
TLYLQMNSLRAEDTAVYYCAKDIGGRSAFDYWGQGTLVTVSS
Variable 4E7 Light Chain
(SEQ ID NO: 156)
DIQMTQSPSSLSASVGDRVTITCRASQSISSYLNWYQQKPGKAPKLLIYAASSLQSGVPSRFSGSGSGTDFTLTISS
LQPEDFATYYCQQSLVAPLTFGQGTKVEIKR
Variable 4E7 Heavy Chain
(SEQ ID NO: 157)
EVQLLESGGGLVQPGGSLRLSCAASGFTFSSYAMSWVRQAPGKGLEWVSSIEEMGWQTKYADSVKGRFTISRDNSKN
TLYLQMNSLRAEDTAVYYCAKSAAAFDYWGQGTLVTVSS
Variable 4E11 Light Chain
(SEQ ID NO: 158)
DIQMTQSPSSLSASVGDRVTITCRASQSISSYLNWYQQKPGKAPKLLIYAASSLQSGVPSRFSGSGSGTDFTLTISS
LQPEDFATYYCQQALDAPLMFGQGTKVEIKR
Variable 4E11 Heavy Chain
(SEQ ID NO: 159)
EVQLLESGGGLVQPGGSLRLSCAASGFTFSSYAMSWVRQAPGKGLEWVSSIEPMGQLTEYADSVKGRFTISRDNSKN
TLYLQMNSLRAEDTAVYYCAKDIGGRSAFDYWGQGTLVTVSS
Variable 6B7 Light Chain
(SEQ ID NO: 160)
DIQMTQSPSSLSASVGDRVTITCRASQSISSYLNWYQQKPGKAPKLLIYAASSLQSGVPSRFSGSGSGTDFTLTISS
LQPEDFATYYCQQALVAPLTFGQGTKVEIKR
Variable 6B7 Heavy Chain
(SEQ ID NO: 161)
EVQLLESGGGLVQPGGSLRLSCAASGFTFSSYAMSWVRQAPGKGLEWVSSIDEMGWQTYYADSVKGRFTISRDNSKN
TLYLQMNSLRAEDTAVYYCAKSAAAFDYWGQGTLVTVSS
Variable 6F8 Light Chain
(SEQ ID NO: 162)
DIQMTQSPSSLSASVGDRVTITCRASQSISSYLNWYQQKPGKAPKLLIYAASSLQSGVPSRFSGSGSGTDFTLTISS
LQPEDFATYYCQQALVAPLTFGQGTKVEIKR
Variable 6F8 Heavy Chain
(SEQ ID NO: 163)
EVQLLESGGGLVQPGGSLRLSCAASGFTFSSYAMSWVRQAPGKGLEWVSSIDEMGWQTYYADSVKGRFTISRDNSKN
TLYLQMNSLRAEDTAVYYCAKSAAAFDYWGQGTLVTVSS

[0393] Antibodies and/or activatable antibodies of the disclosure specifically bind a given target, e.g., a human target protein such as human CD3ε. Also included in the disclosure are anti-CD3ε antibodies, activatable antibodies, multispecific antibodies and/or multispecific activatable antibodies that bind to the same epitope as the anti-CD3ε antibodies, activatable antibodies, multispecific antibodies and/or multispecific activatable antibodies described herein. Also included in the disclosure are anti-CD3ε antibodies, activatable antibodies, multispecific antibodies and/or multispecific activatable antibodies that compete with an anti-CD3ε antibody, activatable antibody, multispecific antibody and/or multispecific activatable antibody described herein for binding to CD3ε, e.g., human CD3ε. Also included in the disclosure are anti-CD3ε antibodies, activatable antibodies, multispecific antibodies and/or multispecific activatable antibodies that cross-compete with an anti-CD3ε antibody, activatable antibody, multispecific antibody and/or multispecific activatable antibody described herein for binding to CD3ε, e.g., human CD3ε.

[0394] Those skilled in the art will recognize that it is possible to determine, without undue experimentation, if an anti-CD3ε antibody, an anti-CD3ε activatable antibody, a multispecific antibody and/or a multispecific activatable antibody has the same or similar specificity as an anti-CD3ε antibody, an anti-CD3ε activatable antibody, a multispecific antibody and/or multispecific activatable antibody of the disclosure by ascertaining whether the former prevents the latter from binding to a target. If the anti-CD3ε antibody, the anti-CD3ε activatable antibody, multispecific antibody and/or a multispecific activatable antibody being tested competes with the anti-CD3ε antibody, the anti-CD3ε activatable antibody, the multispecific antibody and/or a multispecific activatable antibody of the disclosure, as shown by a decrease in binding by the anti-CD3ε antibody, the anti-CD3ε activatable antibody, the multispecific antibody and/or a multispecific activatable antibody of the disclosure, then the anti-CD3ε antibody, the anti-CD3ε activatable antibody, the two multispecific antibodies and/or multispecific activatable antibodies bind to the same, or a closely related, epitope.

[0395] One embodiment for determining whether an anti-CD3ε antibody, an anti-CD3ε activatable antibody, a multispecific antibody and/or a multispecific activatable antibody has the same or similar specificity as an anti-CD3ε antibody, an anti-CD3ε activatable antibody, a multispecific antibody and/or a multispecific activatable antibody of the disclosure is to pre-incubate the anti-CD3ε antibody, the anti-CD3ε activatable antibody, the multispecific antibody and/or a multispecific activatable antibody of the disclosure with soluble target with which it is normally reactive, and then add the anti-CD3ε antibody, the anti-CD3ε activatable antibody, the multispecific antibody and/or a multispecific activatable antibody being tested to determine if the anti-CD3ε antibody, the anti-CD3ε activatable antibody, the multispecific antibody and/or a multispecific activatable antibody being tested is inhibited in its ability to bind the target. If the anti-CD3ε antibody, the anti-CD3ε activatable antibody, the multispecific antibody and/or a multispecific activatable antibody being tested is inhibited then, in all likelihood, it has the same, or functionally equivalent, epitopic specificity as the anti-CD3ε antibody, the anti-CD3ε activatable antibody, the multispecific antibody and/or a multispecific activatable antibody of the disclosure.

[0396] An anti-CD3ε antibody, an anti-CD3ε activatable antibody, multispecific antibody and/or a multispecific activatable antibody is generated, for example, using the procedures described in the Examples provided below. An anti-CD3ε antibody, an anti-CD3ε activatable antibody, multispecific antibody and/or a multispecific activatable antibody can also be generated using any of a number of art-recognized techniques for antibody production and/or purification.

[0397] Antibody fragments, such as Fv, F(ab′)₂ and Fab, for use in an anti-CD3ε antibody, an anti-CD3ε activatable antibody, a multispecific antibody and/or a multispecific activatable antibody may be prepared by cleavage of the intact protein, e.g., by protease or chemical cleavage. In some embodiments, a truncated gene is designed. For example, a chimeric gene encoding a portion of the F(ab′)₂ fragment would include DNA sequences encoding the CH1 domain and hinge region of the H chain, followed by a translational stop codon to yield the truncated molecule.

[0398] Expression vectors include plasmids, retroviruses, YACs, EBV derived episomes, and the like. A convenient vector is one that encodes a functionally complete human CH or CL immunoglobulin sequence, with appropriate restriction sites engineered so that any VH or VL sequence can be easily inserted and expressed. In such vectors, splicing usually occurs between the splice donor site in the inserted J region and the splice acceptor site preceding the human C region, and also at the splice regions that occur within the human CH exons. Polyadenylation and transcription termination occur at native chromosomal sites downstream of the coding regions. The resulting antibody may be joined to any strong promoter, including retroviral LTRs, e.g., SV-40 early promoter, (Okayama et al. Mol. Cell. Bio. 3:280 (1983)), Rous sarcoma virus LTR (Gorman et al. P.N.A.S. 79:6777 (1982)), and moloney murine leukemia virus LTR (Grosschedl et al. Cell 41:885 (1985)). Also, as will be appreciated, native Ig promoters and the like may be used.

[0399] Further, anti-CD3ε antibodies, anti-CD3ε activatable antibodies, multispecific antibodies and/or multispecific activatable antibodies can be generated through display type technologies, including, without limitation, phage display, retroviral display, ribosomal display, and other techniques, using techniques well known in the art and the resulting molecules can be subjected to additional maturation, such as affinity maturation, as such techniques are well known in the art. Wright et al. Crit, Reviews in Immunol. 12125-168 (1992), Hanes and Plückthun PNAS USA 94:4937-4942 (1997) (ribosomal display), Parmley and Smith Gene 73:305-318 (1988) (phage display), Scott, TIBS, vol. 17:241-245 (1992), Cwirla et al. PNAS USA 87:6378-6382 (1990), Russel et al. Nucl. Acids Research 21:1081-1085 (1993), Hoganboom et al. Immunol. Reviews 130:43-68 (1992), Chiswell and McCafferty TIBTECH; 10:80-8A (1992), and U.S. Pat. No. 5,733,743.

[0400] It can be desirable to modify the anti-CD3ε antibody, the anti-CD3ε activatable antibody, the multispecific antibody and/or multispecific activatable antibody of the disclosure with respect to effector function, so as to enhance or reduce such function to improve the effectiveness of the antibody in recruiting CD3⁺ cells to one or more targets that are associated with a disease to be treated, such as, e.g. targets that are expressed on tumor cells. For example, cysteine residue(s) can be introduced into the Fc region, thereby allowing interchain disulfide bond formation in this region. The homodimeric antibody thus generated can have improved internalization capability and/or increased complement-mediated cell killing and antibody-dependent cellular cytotoxicity (ADCC). (See Caron et al., J. Exp Med., 176: 1191-1195 (1992) and Shopes, J. Immunol., 148: 2918-2922 (1992)). In some embodiments, an antibody can be engineered that has dual Fc regions and can thereby have enhanced complement lysis and ADCC capabilities. (See Stevenson et al., Anti-Cancer Drug Design, 3: 219-230 (1989)). In some embodiments, Fc mutations are made to remove glycosylation sites, thereby reducing Fc function.

### Activatable Antibodies and Multispecific Activatable Antibodies

[0401] The activatable antibodies provided herein contain an antibody or antibody fragment thereof (collectively referred to as AB throughout the disclosure) that specifically binds a target and/or a epitope, wherein the AB is modified by a masking moiety (MM). The multispecific activatable antibodies provided herein contain at least a first antibody or antibody fragment thereof (collectively referred to as AB1 throughout the disclosure) that specifically binds a first target and/or a first epitope and a second antibody or antibody fragment thereof (collectively referred to as AB2 throughout the disclosure) that specifically binds a second target and/or a second epitope, wherein at least one of the AB is modified by a masking moiety (MM). In some embodiments, each AB in a multispecific activatable antibody is modified by its own masking moiety.

[0402] When the AB of an activatable antibody or at least one of the AB in a multispecific activatable antibody is modified with a MM and is in the presence of its target, specific binding of the AB to its target is reduced or inhibited, as compared to the specific binding of the AB not modified with an MM or the specific binding of the parental AB to the target.

[0403] The K_{d} of the AB modified with a MM towards the target is at least 5, 10, 20, 25, 40, 50, 100, 250, 500, 1,000, 2,500, 5,000, 10,000, 50,000, 100,000, 500,000, 1,000,000, 5,000,000, 10,000,000, 50,000,000 or greater, or between 5-10, 10-100, 10-1,000, 10-10,000, 10-100,000, 10-1,000,000, 10-10,000,000, 100-1,000, 100-10,000, 100-100,000, 100-1,000,000, 100-10,000,000, 1,000-10,000, 1,000-100,000, 1,000-1,000,000, 1000-10,000,000, 10,000-100,000, 10,000-1,000,000, 10,000-10,000,000, 100,000-1,000,000, or 100,000-10,000,000 times greater than the K_{d} of the AB not modified with an MM or of the parental AB towards the target. Conversely, the binding affinity of the AB modified with a MM towards the target is at least 5, 10, 20, 25, 40, 50, 100, 250, 500, 1,000, 2,500, 5,000, 10,000, 50,000, 100,000, 500,000, 1,000,000, 5,000,000, 10,000,000, 50,000,000 or greater, or between 5-10, 10-100, 10-1,000, 10-10,000, 10-100,000, 10-1,000,000, 10-10,000,000, 100-1,000, 100-10,000, 100-100,000, 100-1,000,000, 100-10,000,000, 1,000-10,000, 1,000-100,000, 1,000-1,000,000, 1000-10,000,000, 10,000-100,000, 10,000-1,000,000, 10,000-10,000,000, 100,000-1,000,000, or 100,000-10,000,000 times lower than the binding affinity of the AB not modified with an MM or of the parental AB towards the target.

[0404] The dissociation constant (K_{d}) of the MM towards the AB in the activatable antibody is generally greater than the K_{d} of the AB towards the target. The dissociation constant (K_{d}) of the MM towards at least one of the AB in the multispecific activatable antibody is generally greater than the K_{d} of the AB towards the target. The K_{d} of the MM towards the AB can be at least 5, 10, 25, 50, 100, 250, 500, 1,000, 2,500, 5,000, 10,000, 100,000, 1,000,000 or even 10,000,000 times greater than the K_{d} of the AB towards the target. Conversely, the binding affinity of the MM towards the AB is generally lower than the binding affinity of the AB towards the target. The binding affinity of MM towards the AB can be at least 5, 10, 25, 50, 100, 250, 500, 1,000, 2,500, 5,000, 10,000, 100,000, 1,000,000 or even 10,000,000 times lower than the binding affinity of the AB towards the target.

[0405] When the AB in the activatable antibody is modified with a MM and is in the presence of the target, specific binding of the AB to its target is reduced or inhibited, as compared to the specific binding of the AB not modified with an MM or the specific binding of the parental AB to the target. When at least one of the AB in the multispecific activatable antibody is modified with a MM and is in the presence of the target, specific binding of the AB to its target is reduced or inhibited, as compared to the specific binding of the AB not modified with an MM or the specific binding of the parental AB to the target. When compared to the binding of the AB not modified with an MM or the binding of the parental AB to the target, the AB's ability to bind the target when modified with an MM can be reduced by at least 50%, 60%, 70%, 80%, 90%, 92%, 93%, 94%, 95%, 96%, 97%, 98%, 99% and even 100% for at least 2, 4, 6, 8, 12, 28, 24, 30, 36, 48, 60, 72, 84, or 96 hours, or 5, 10, 15, 30, 45, 60, 90, 120, 150, or 180 days, or 1, 2, 3, 4, 5, 6, 7, 8, 9, 10, 11, or 12 months or more when measured in vivo or in an in vitro assay.

[0406] The MM inhibits the binding of the AB in the activatable antibody to its target. The MM inhibits the binding of at least one of the AB in the multispecific activatable antibody to its target. The MM binds the antigen binding domain of the AB and inhibits binding of the AB to its target. The MM can sterically inhibit the binding of the AB to the target. The MM can allosterically inhibit the binding of the AB to its target. In these embodiments when the AB is modified or coupled to a MM and in the presence of target, there is no binding or substantially no binding of the AB to the target, or no more than 0.001%, 0.01%, 0.1%, 1%, 2%, 3%, 4%, 5%, 6%, 7%, 8%, 9%, 10%, 15%, 20%, 25%, 30%, 35%, 40%, or 50% binding of the AB to the target, as compared to the binding of the AB not modified with an MM, the parental AB, or the AB not coupled to an MM to the target, for at least 2, 4, 6, 8, 12, 28, 24, 30, 36, 48, 60, 72, 84, or 96 hours, or 5, 10, 15, 30, 45, 60, 90, 120, 150, or 180 days, or 1, 2, 3, 4, 5, 6, 7, 8, 9, 10, 11, or 12 months or longer when measured in vivo or in an in vitro assay.

[0407] When the AB in an activatable antibody is coupled to or modified by a MM, the MM ‘masks’ or reduces or otherwise inhibits the specific binding of the AB to its target. When the AB in an activatable antibody is coupled to or modified by a MM, such coupling or modification can effect a structural change that reduces or inhibits the ability of the AB to specifically bind its target.

[0408] When at least one of the AB in a multispecific activatable antibody is coupled to or modified by a MM, the MM ‘masks’ or reduces or otherwise inhibits the specific binding of the AB to its target. When at least one of the AB in a multispecific activatable antibody is coupled to or modified by a MM, such coupling or modification can effect a structural change that reduces or inhibits the ability of the AB to specifically bind its target.

[0409] In an activatable antibody, when the AB is coupled to or modified with an MM, at least a portion of the activatable antibody can be represented by the following formulae (in order from an amino (N) terminal region to carboxyl (C) terminal region:
[0410] (MM)-(AB)
[0411] (AB)-(MM)
[0412] (MM)-L-(AB)
[0413] (AB)-L-(MM)
   where MM is a masking moiety, the AB is an antibody or antibody fragment thereof, and the L is a linker. In many embodiments, it may be desirable to insert one or more linkers, e.g., flexible linkers, into the composition so as to provide for flexibility.

[0414] In a multispecific activatable antibody, when at least one AB is coupled to or modified with an MM, at least a portion of the multispecific activatable antibody can be represented by the following formulae (in order from an amino (N) terminal region to carboxyl (C) terminal region:
[0415] (MM)-(AB)
[0416] (AB)-(MM)
[0417] (MM)-L-(AB)
[0418] (AB)-L-(MM)
   where MM is a masking moiety, the AB is an antibody or antibody fragment thereof, and the L is a linker. In many embodiments, it may be desirable to insert one or more linkers, e.g., flexible linkers, into the composition so as to provide for flexibility.

[0419] In certain embodiments, the MM is not a natural binding partner of the AB. In some embodiments, the MM contains no or substantially no homology to any natural binding partner of the AB. In other embodiments the MM is no more than 5%, 10%, 15%, 20%, 25%, 30%, 35%, 40%, 45%, 50%, 55%, 60%, 65%, 70%, 75%, or 80% similar to any natural binding partner of the AB. In some embodiments, the MM is no more than 5%, 10%, 15%, 20%, 25%, 30%, 35%, 40%, 45%, 50%, 55%, 60%, 65%, 70%, 75%, or 80% identical to any natural binding partner of the AB. In some embodiments, the MM is no more than 25% identical to any natural binding partner of the AB. In some embodiments, the MM is no more than 50% identical to any natural binding partner of the AB. In some embodiments, the MM is no more than 20% identical to any natural binding partner of the AB. In some embodiments, the MM is no more than 10% identical to any natural binding partner of the AB.

[0420] In some embodiments, the activatable antibodies and/or the multispecific activatable antibodies include an AB that is modified by an MM and also includes one or more cleavable moieties (CM). Such activatable antibodies and/or multispecific activatable antibodies exhibit activatable/switchable binding, to the AB's target. Activatable antibodies and/or multispecific activatable antibodies generally include at least one antibody or antibody fragment (AB), modified by or coupled to a masking moiety (MM) and a modifiable or cleavable moiety (CM). In some embodiments, the CM contains an amino acid sequence that serves as a substrate for a protease of interest.

[0421] The elements of the activatable antibodies and/or multispecific activatable antibodies are arranged so that each MM and CM are positioned such that in a cleaved (or relatively active) state and in the presence of a target, the corresponding AB binds a target, while in an uncleaved (or relatively inactive) state in the presence of the target, specific binding of the AB to its target, is reduced or inhibited. The specific binding of the AB to its target can be reduced due to the inhibition or masking of the AB's ability to specifically bind its target by the MM.

[0422] The K_{d} of each AB modified with a MM and a CM towards the target, is at least 5, 10, 20, 25, 40, 50, 100, 250, 500, 1,000, 2,500, 5,000, 10,000, 50,000, 100,000, 500,000, 1,000,000, 5,000,000, 10,000,000, 50,000,000 or greater, or between 5-10, 10-100, 10-1,000, 10-10,000, 10-100,000, 10-1,000,000, 10-10,000,000, 100-1,000, 100-10,000, 100-100,000, 100-1,000,000, 100-10,000,000, 1,000-10,000, 1,000-100,000, 1,000-1,000,000, 1000-10,000,000, 10,000-100,000, 10,000-1,000,000, 10,000-10,000,000, 100,000-1,000,000, or 100,000-10,000,000 times greater than the K_{d} of the AB not modified with an MM and a CM or of the parental AB towards the target. Conversely, the binding affinity of each AB modified with a MM and a CM towards the target, is at least 5, 10, 20, 25, 40, 50, 100, 250, 500, 1,000, 2,500, 5,000, 10,000, 50,000, 100,000, 500,000, 1,000,000, 5,000,000, 10,000,000, 50,000,000 or greater, or between 5-10, 10-100, 10-1,000, 10-10,000, 10-100,000, 10-1,000,000, 10-10,000,000, 100-1,000, 100-10,000, 100-100,000, 100-1,000,000, 100-10,000,000, 1,000-10,000, 1,000-100,000, 1,000-1,000,000, 1000-10,000,000, 10,000-100,000, 10,000-1,000,000, 10,000-10,000,000, 100,000-1,000,000, or 100,000-10,000,000 times lower than the binding affinity of the AB not modified with an MM and a CM or of the parental AB towards the target.

[0423] When at least one AB is modified with a MM and a CM and is in the presence of the target but not in the presence of a modifying agent (for example a protease), specific binding of that AB to its target, is reduced or inhibited, as compared to the specific binding of the AB not modified with an MM and a CM or of the parental AB to the target. When compared to the binding of the parental AB or the binding of an AB not modified with an MM and a CM to its target, the AB's ability to bind the target when modified with an MM and a CM can be reduced by at least 50%, 60%, 70%, 80%, 90%, 92%, 93%, 94%, 95%, 96%, 97%, 98%, 99% and even 100% for at least 2, 4, 6, 8, 12, 28, 24, 30, 36, 48, 60, 72, 84, or 96 hours or 5, 10, 15, 30, 45, 60, 90, 120, 150, or 180 days, or 1, 2, 3, 4, 5, 6, 7, 8, 9, 10, 11, or 12 months or longer when measured in vivo or in an in vitro assay.

[0424] As used herein, the term cleaved state refers to the condition of the activatable antibodies and/or multispecific activatable antibodies following modification of the CM by a protease. The term uncleaved state, as used herein, refers to the condition of the activatable antibodies and/or multispecific activatable antibodies in the absence of cleavage of the CM by a protease. As discussed above, the term “activatable antibodies” is used herein to refer to an activatable antibody in both its uncleaved (native) state, as well as in its cleaved state. It will be apparent to the ordinarily skilled artisan that in some embodiments, a cleaved activatable antibody may lack an MM due to cleavage of the CM by protease, resulting in release of at least the MM (e.g., where the MM is not joined to the activatable antibodies by a covalent bond (e.g., a disulfide bond between cysteine residues). As discussed above, the term “multispecific activatable antibodies” is used herein to refer to a multispecific activatable antibody in both its uncleaved (native) state, as well as in its cleaved state. It will be apparent to the ordinarily skilled artisan that in some embodiments, a cleaved multispecific activatable antibody may lack an MM due to cleavage of the CM by protease, resulting in release of at least the MM (e.g., where the MM is not joined to the multispecific activatable antibodies by a covalent bond (e.g., a disulfide bond between cysteine residues).

[0425] By activatable or switchable is meant that the activatable antibody and/or multispecific activatable antibody exhibits a first level of binding to a target when the activatable antibody is in a inhibited, masked or uncleaved state (i.e., a first conformation), and a second level of binding to the target, when the activatable antibody is in the uninhibited, unmasked and/or cleaved state (i.e., a second conformation), where the second level of target binding is greater than the first level of binding. In general, the access of target to the corresponding AB of the activatable antibody and/or multispecific activatable antibody is greater in the presence of a cleaving agent capable of cleaving the CM than in the absence of such a cleaving agent. Thus, when the activatable antibody and/or multispecific activatable antibody is in the uncleaved state, at least one AB is inhibited from target binding and can be masked from target binding (i.e., the first conformation is such the AB cannot bind the target), and when the activatable antibody is in the cleaved state the AB is not inhibited or is unmasked to target binding.

[0426] The CM and AB of the activatable antibodies are selected so that the first AB represents a binding moiety for CD3ε, and the CM represents a substrate for a protease that is produced by a tumor that is in proximity to cells that express CD3ε and/or produced by a tumor that is co-localized with CD3ε at a treatment site or diagnostic site in a subject. The activatable antibodies disclosed herein find particular use where, for example, a protease capable of cleaving a site in the CM is present at relatively higher levels in CD3ε-containing tissue of a treatment site or diagnostic site than in tissue of non-treatment sites (for example in healthy tissue).

[0427] The CM and AB of the activatable antibodies and/or multispecific activatable antibodies are selected so that the first AB represents a binding moiety for a first target and/or epitope, and the CM represents a substrate for a protease that is produced by a tumor that is in proximity to cells that express the target and/or produced by a tumor that is co-localized with the target at a treatment site or diagnostic site in a subject. The activatable antibodies and/or multispecific activatable antibodies disclosed herein find particular use where, for example, a protease capable of cleaving a site in the CM is present at relatively higher levels in target-containing tissue of a treatment site or diagnostic site than in tissue of non-treatment sites (for example in healthy tissue).

[0428] In some embodiments, activatable antibodies provide for reduced toxicity and/or adverse side effects that could otherwise result from binding of the AB at non-treatment sites if the AB were not masked or otherwise inhibited from binding CD3ε.

[0429] In general, an activatable antibody can be designed by selecting at first AB of interest and constructing the remainder of the activatable antibody so that, when conformationally constrained, the MM provides for masking of the AB or reduction of binding of the AB to CD3ε. Structural design criteria can be to be taken into account to provide for this functional feature.

[0430] In some embodiments, multispecific activatable antibodies provide for reduced toxicity and/or adverse side effects that could otherwise result from binding of the first AB at non-treatment sites if the AB were not masked or otherwise inhibited from binding its target.

[0431] In general, a multispecific activatable antibody can be designed by selecting at first AB of interest and constructing the remainder of the activatable antibody so that, when conformationally constrained, the MM provides for masking of the AB or reduction of binding of the AB to its target. Structural design criteria can be to be taken into account to provide for this functional feature.

[0432] Activatable antibodies and/or multispecific activatable antibodies exhibiting a switchable phenotype of a desired dynamic range for target binding in an inhibited versus an uninhibited conformation are provided. Dynamic range generally refers to a ratio of (a) a maximum detected level of a parameter under a first set of conditions to (b) a minimum detected value of that parameter under a second set of conditions. For example, in the context of an activatable antibody and/or a multispecific activatable antibody, the dynamic range refers to the ratio of (a) a maximum detected level of target protein, binding to an activatable antibody and/or a multispecific activatable antibody in the presence of protease capable of cleaving the CM of the activatable antibodies to (b) a minimum detected level of target protein, binding to an activatable antibody and/or a multispecific activatable antibody in the absence of the protease. The dynamic range of an activatable antibody and/or a multispecific activatable antibody can be calculated as the ratio of the dissociation constant of an activatable antibody and/or a multispecific activatable antibody cleaving agent (e.g., enzyme) treatment to the dissociation constant of the activatable antibodies cleaving agent treatment. The greater the dynamic range of an activatable antibody and/or multispecific activatable antibody, the better the switchable phenotype of the activatable antibody. Activatable antibodies having relatively higher dynamic range values (e.g., greater than 1) exhibit more desirable switching phenotypes such that target protein binding by the activatable antibodies occurs to a greater extent (e.g., predominantly occurs) in the presence of a cleaving agent (e.g., enzyme) capable of cleaving the CM of the activatable antibodies than in the absence of a cleaving agent.

[0433] Activatable antibodies and/or multispecific activatable antibodies can be provided in a variety of structural configurations. Exemplary formulae for at least a portion of an activatable antibody and/or a multispecific activatable antibody are provided below. It is specifically contemplated that the N- to C-terminal order of the AB, the corresponding MM and CM may be reversed within an activatable antibody. It is also specifically contemplated that the CM and MM may overlap in amino acid sequence, e.g., such that the CM is contained within the MM.

[0434] For example, at least a portion of the activatable antibody activatable antibodies can be represented by the following formula (in order from an amino (N) terminal region to carboxyl (C) terminal region:
[0435] (MM)-(CM)-(AB)
[0436] (AB)-(CM)-(MM)
   where MM is a masking moiety, CM is a cleavable moiety, and AB is an antibody or fragment thereof. It should be noted that although MM and CM are indicated as distinct components in the formulae above, in all exemplary embodiments (including formulae) disclosed herein it is contemplated that the amino acid sequences of the MM and the CM could overlap, e.g., such that the CM is completely or partially contained within the MM. In addition, the formulae above provide for additional amino acid sequences that may be positioned N-terminal or C-terminal to the activatable antibodies elements.

[0437] For example, at least a portion of the multispecific activatable antibodies can be represented by the following formula (in order from an amino (N) terminal region to carboxyl (C) terminal region:
[0438] (MM)-(CM)-(AB)
[0439] (AB)-(CM)-(MM)
   where MM is a masking moiety, CM is a cleavable moiety, and AB is a first antibody or fragment thereof. It should be noted that although MM and CM are indicated as distinct components in the formulae above, in all exemplary embodiments (including formulae) disclosed herein it is contemplated that the amino acid sequences of the MM and the CM could overlap, e.g., such that the CM is completely or partially contained within the MM. In addition, the formulae above provide for additional amino acid sequences that may be positioned N-terminal or C-terminal to the activatable antibodies elements.

[0440] In certain embodiments, the MM is not a natural binding partner of the AB. In some embodiments, the MM contains no or substantially no homology to any natural binding partner of the AB. In other embodiments the MM is no more than 5%, 10%, 15%, 20%, 25%, 30%, 35%, 40%, 45%, 50%, 55%, 60%, 65%, 70%, 75%, or 80% similar to any natural binding partner of the AB. In some embodiments, the MM is no more than 5%, 10%, 15%, 20%, 25%, 30%, 35%, 40%, 45%, 50%, 55%, 60%, 65%, 70%, 75%, or 80% identical to any natural binding partner of the AB. In some embodiments, the MM is no more than 50% identical to any natural binding partner of the AB. In some embodiments, the MM is no more than 25% identical to any natural binding partner of the AB. In some embodiments, the MM is no more than 20% identical to any natural binding partner of the AB. In some embodiments, the MM is no more than 10% identical to any natural binding partner of the AB.

[0441] In many embodiments it may be desirable to insert one or more linkers, e.g., flexible linkers, into the activatable antibody and/or the multispecific activatable antibody construct so as to provide for flexibility at one or more of the MM-CM junction, the CM-AB junction, or both. For example, the AB, MM, and/or CM may not contain a sufficient number of residues (e.g., Gly, Ser, Asp, Asn, especially Gly and Ser, particularly Gly) to provide the desired flexibility. As such, the switchable phenotype of such activatable antibody and/or multispecific activatable antibody constructs may benefit from introduction of one or more amino acids to provide for a flexible linker. In addition, as described below, where the activatable antibody and/or the multispecific activatable antibody is provided as a conformationally constrained construct, a flexible linker can be operably inserted to facilitate formation and maintenance of a cyclic structure in the uncleaved activatable antibody and/or the uncleaved multispecific activatable antibody.

[0442] For example, in certain embodiments an activatable antibody and/or a multispecific activatable antibody comprises one of the following formulae (where the formula below represent an amino acid sequence in either N- to C-terminal direction or C- to N-terminal direction):
[0443] (MM)-L1-(CM)-(AB)
[0444] (MM)-(CM)-L2-(AB)
[0445] (MM)-L1-(CM)-L2-(AB)
   wherein MM, CM, and AB are as defined above; wherein L1 and L2 are each independently and optionally present or absent, are the same or different flexible linkers that include at least 1 flexible amino acid (e.g., Gly). In addition, the formulae above provide for additional amino acid sequences that may be positioned N-terminal or C-terminal to the activatable antibody and/or the multispecific activatable antibodies elements. Examples include, but are not limited to, targeting moieties (e.g., a ligand for a receptor of a cell present in a target tissue) and serum half-life extending moieties (e.g., polypeptides that bind serum proteins, such as immunoglobulin (e.g., IgG) or serum albumin (e.g., human serum albumin (HAS)).

[0446] In some non-limiting embodiments, at least one of the AB in the multispecific activatable antibody is a binding partner for any target listed in Table 1.

[0447] In some non-limiting embodiments, at least one of the AB in the multispecific activatable antibody comprises, is or is derived from a sequence set forth in the Examples provided herein.

[0448] In some non-limiting embodiments, at least one of the AB in the multispecific activatable antibody comprises, is or is derived from a sequence set forth in Example 2 and/or Example 4 in the Examples provided herein.

[0449] In some non-limiting embodiments, at least one of the AB in the multispecific activatable antibody is or is derived from an antibody listed in Table 2.

[0450] In some embodiments, the masking moiety is selected for use with a specific antibody or antibody fragment. For example, suitable masking moieties for use with antibodies that bind EGFR include MMs that include the sequence CISPRG (SEQ ID NO: 164). By way of non-limiting examples, the MM can include a sequence such as CISPRGC (SEQ ID NO: 165); CISPRGCG (SEQ ID NO: 166); CISPRGCPDGPYVMY (SEQ ID NO: 167); CISPRGCPDGPYVM (SEQ ID NO: 168), CISPRGCEPGTYVPT (SEQ ID NO: 169) and CISPRGCPGQIWHPP (SEQ ID NO: 170). Other suitable masking moieties include any of the EGFR-specific masks disclosed in PCT Publication No. WO 2010/081173, such as, by way of non-limiting example, GSHCLIPINMGAPSC (SEQ ID NO: 171); CISPRGCGGSSASQSGQGSHCLIPINMGAPSC (SEQ ID NO: 172); CNHHYFYTCGCISPRGCPG (SEQ ID NO: 173); ADHVFWGSYGCISPRGCPG (SEQ ID NO: 174); CHHVYWGHCGCISPRGCPG (SEQ ID NO: 175); CPHFTTTSCGCISPRGCPG (SEQ ID NO: 176); CNHHYHYYCGCISPRGCPG (SEQ ID NO: 177); CPHVSFGSCGCISPRGCPG (SEQ ID NO: 178); CPYYTLSYCGCISPRGCPG (SEQ ID NO: 179); CNHVYFGTCGCISPRGCPG (SEQ ID NO: 180); CNHFTLTTCGCISPRGCPG (SEQ ID NO: 181); CHHFTLTTCGCISPRGCPG (SEQ ID NO: 182); YNPCATPMCCISPRGCPG (SEQ ID NO: 183); CNHHYFYTCGCISPRGCG (SEQ ID NO: 184); CNHHYHYYCGCISPRGCG (SEQ ID NO: 185); CNHVYFGTCGCISPRGCG (SEQ ID NO: 186); CHHVYWGHCGCISPRGCG (SEQ ID NO: 187); CPHFTTTSCGCISPRGCG (SEQ ID NO: 188); CNHFTLTTCGCISPRGCG (SEQ ID NO: 189); CHHFTLTTCGCISPRGCG (SEQ ID NO: 190); CPYYTLSYCGCISPRGCG (SEQ ID NO: 191); CPHVSFGSCGCISPRGCG (SEQ ID NO: 192); ADHVFWGSYGCISPRGCG (SEQ ID NO: 193); YNPCATPMCCISPRGCG (SEQ ID NO: 194); CHHVYWGHCGCISPRGCG (SEQ ID NO: 195); C(N/P)H(HN/F)(Y/T)(F/W/T/L)(Y/G/T/S)(T/S/Y/H)CGCISPRGCG (SEQ ID NO: 196); CISPRGCGQPIPSVK (SEQ ID NO: 197); CISPRGCTQPYHVSR (SEQ ID NO: 198); and/or CISPRGCNAVSGLGS (SEQ ID NO: 199).

[0451] Suitable masking moieties for use with antibodies that bind a Jagged target, e.g., Jagged 1 and/or Jagged 2, include, by way of non-limiting example, masking moieties that include a sequence such as QGQSGQCNIWLVGGDCRGWQG (SEQ ID NO: 200); QGQSGQGQQQWCNIWINGGDCRGWNG (SEQ ID NO: 201); PWCMQRQDFLRCPQP (SEQ ID NO: 202); QLGLPAYMCTFECLR (SEQ ID NO: 203); CNLWVSGGDCGGLQG (SEQ ID NO: 204); SCSLWTSGSCLPHSP (SEQ ID NO: 205); YCLQLPHYMQAMCGR (SEQ ID NO: 206); CFLYSCTDVSYWNNT (SEQ ID NO: 207); PWCMQRQDYLRCPQP (SEQ ID NO: 208); CNLWISGGDCRGLAG (SEQ ID NO: 209); CNLWVSGGDCRGVQG (SEQ ID NO: 210); CNLWVSGGDCRGLRG (SEQ ID NO: 211); CNLWISGGDCRGLPG (SEQ ID NO: 212); CNLWVSGGDCRDAPW (SEQ ID NO: 213); CNLWVSGGDCRDLLG (SEQ ID NO: 214); CNLWVSGGDCRGLQG (SEQ ID NO: 215); CNLWLHGGDCRGWQG (SEQ ID NO: 216); CNIWLVGGDCRGWQG (SEQ ID NO: 217); CTTWFCGGDCGVMRG (SEQ ID NO: 218); CNIWGPSVDCGALLG (SEQ ID NO: 219); CNIWVNGGDCRSFEG (SEQ ID NO: 220); YCLNLPRYMQDMCWA (SEQ ID NO: 221); YCLALPHYMQADCAR (SEQ ID NO: 222); CFLYSCGDVSYWGSA (SEQ ID NO: 223); CYLYSCTDSAFWNNR (SEQ ID NO: 224); CYLYSCNDVSYWSNT (SEQ ID NO: 225); CFLYSCTDVSYW (SEQ ID NO: 226); CFLYSCTDVAYWNSA (SEQ ID NO: 227); CFLYSCTDVSYWGDT (SEQ ID NO: 228); CFLYSCTDVSYWGNS (SEQ ID NO: 229); CFLYSCTDVAYWNNT (SEQ ID NO: 230); CFLYSCGDVSYWGNPGLS (SEQ ID NO: 231); CFLYSCTDVAYWSGL (SEQ ID NO: 232); CYLYSCTDGSYWNST (SEQ ID NO: 233); CFLYSCSDVSYWGNI (SEQ ID NO: 234); CFLYSCTDVAYW (SEQ ID NO: 235); CFLYSCTDVSYWGST (SEQ ID NO: 236); CFLYSCTDVAYWGDT (SEQ ID NO: 237); GCNIWLNGGDCRGWVDPLQG (SEQ ID NO: 238); GCNIWLVGGDCRGWIGDTNG (SEQ ID NO: 239); GCNIWLVGGDCRGWIEDSNG (SEQ ID NO: 240); GCNIWANGGDCRGWIDNIDG (SEQ ID NO: 241); GCNIWLVGGDCRGWLGEAVG (SEQ ID NO: 242); GCNIWLVGGDCRGWLEEAVG (SEQ ID NO: 243); GGPALCNIWLNGGDCRGWSG (SEQ ID NO: 244); GAPVFCNIWLNGGDCRGWMG (SEQ ID NO: 245); GQQQWCNIWINGGDCRGWNG (SEQ ID NO: 246); GKSEFCNIWLNGGDCRGWIG (SEQ ID NO: 247); GTPGGCNIWANGGDCRGWEG (SEQ ID NO: 248); GASQYCNLWINGGDCRGWRG (SEQ ID NO: 249); GCNIWLVGGDCRPWVEGG (SEQ ID NO: 250); GCNIWAVGGDCRPFVDGG (SEQ ID NO: 251); GCNIWLNGGDCRAWVDTG (SEQ ID NO: 252); GCNIWIVGGDCRPFINDG (SEQ ID NO: 253); GCNIWLNGGDCRPVVFGG (SEQ ID NO: 254); GCNIWLSGGDCRMFMNEG (SEQ ID NO: 255); GCNIWVNGGDCRSFVYSG (SEQ ID NO: 256); GCNIWLNGGDCRGWEASG (SEQ ID NO: 257); GCNIWAHGGDCRGFIEPG (SEQ ID NO: 258); GCNIWLNGGDCRTFVASG (SEQ ID NO: 259); GCNIWAHGGDCRGFIEPG (SEQ ID NO: 260); GFLENCNIWLNGGDCRTG (SEQ ID NO: 261); GIYENCNIWLNGGDCRMG (SEQ ID NO: 262); and/or GIPDNCNIWINGGDCRYG (SEQ ID NO: 263).

[0452] Suitable masking moieties for use with antibodies that bind an interleukin 6 target, e.g., interleukin 6 receptor (IL-6R), include, by way of non-limiting example, masking moieties that include a sequence such as QGQSGQYGSCSWNYVHIFMDC (SEQ ID NO: 264); QGQSGQGDFDIPFPAHWVPIT (SEQ ID NO: 265); QGQSGQMGVPAGCVWNYAHIFMDC (SEQ ID NO: 266); YRSCNWNYVSIFLDC (SEQ ID NO: 267); PGAFDIPFPAHWVPNT (SEQ ID NO: 268); ESSCVWNYVHIYMDC (SEQ ID NO: 269); YPGCKWNYDRIFLDC (SEQ ID NO: 270); YRTCSWNYVGIFLDC (SEQ ID NO: 271); YGSCSWNYVHIFMDC (SEQ ID NO: 272); YGSCSWNYVHIFLDC (SEQ ID NO: 273); YGSCNWNYVHIFLDC (SEQ ID NO: 274); YTSCNWNYVHIFMDC (SEQ ID NO: 275); YPGCKWNYDRIFLDC (SEQ ID NO: 276); WRSCNWNYAHIFLDC (SEQ ID NO: 277); WSNCHWNYVHIFLDC (SEQ ID NO: 278); DRSCTWNYVRISYDC (SEQ ID NO: 279); SGSCKWDYVHIFLDC (SEQ ID NO: 280); SRSCIWNYAHIHLDC (SEQ ID NO: 281); SMSCYWQYERIFLDC (SEQ ID NO: 282); YRSCNWNYVSIFLDC (SEQ ID NO: 283); YGSCSWNYVHIFMDC (SEQ ID NO: 284); SGSCKWDYVHIFLDC (SEQ ID NO: 285); YKSCHWDYVHIFLDC (SEQ ID NO: 286); YGSCTWNYVHIFMEC (SEQ ID NO: 287); FSSCNWNYVHIFLDC (SEQ ID NO: 288); WRSCNWNYAHIFLDC (SEQ ID NO: 289); YGSCQWNYVHIFLDC (SEQ ID NO: 290); YRSCNWNYVHIFLDC (SEQ ID NO: 291); NMSCHWDYVHIFLDC (SEQ ID NO: 292); FGPCTWNYARISWDC (SEQ ID NO: 293); XXsCXWXYvhIfXdC (SEQ ID NO: 294); MGVPAGCVWNYAHIFMDC (SEQ ID NO: 295); RDTGGQCRWDYVHIFMDC (SEQ ID NO: 296); AGVPAGCTWNYVHIFMEC (SEQ ID NO: 297); VGVPNGCVWNYAHIFMEC (SEQ ID NO: 298); DGGPAGCSWNYVHIFMEC (SEQ ID NO: 299); AVGPAGCWWNYVHIFMEC (SEQ ID NO: 300); CTWNYVHIFMDCGEGEGP (SEQ ID NO: 301); GGVPEGCTWNYAHIFMEC (SEQ ID NO: 302); AEVPAGCWWNYVHIFMEC (SEQ ID NO: 303); AGVPAGCTWNYVHIFMEC (SEQ ID NO: 304); SGASGGCKWNYVHIFMDC (SEQ ID NO: 305); MGVPAGCVWNYAHIFMDC (SEQ ID NO: 306); TPGCRWNYVHIFMECEAL (SEQ ID NO: 307); VGVPNGCVWNYAHIFMEC (SEQ ID NO: 308); PGAFDIPFPAHWVPNT (SEQ ID NO: 309); RGACDIPFPAHWIPNT (SEQ ID NO: 310); QGDFDIPFPAHWVPIT (SEQ ID NO: 311); XGafDIPFPAHWvPnT (SEQ ID NO: 312); RGDGNDSDIPFPAHWVPRT (SEQ ID NO: 313); SGVGRDRDIPFPAHWVPRT (SEQ ID NO: 314); WAGGNDCDIPFPAHWIPNT (SEQ ID NO: 315); WGDGMDVDIPFPAHWVPVT (SEQ ID NO: 316); AGSGNDSDIPFPAHWVPRT (SEQ ID NO: 317); ESRSGYADIPFPAHWVPRT (SEQ ID NO: 318); and/or RECGRCGDIPFPAHWVPRT (SEQ ID NO: 319).

[0453] In some embodiments, the cleavable moiety (CM) of the activatable antibody and/or the multispecific activatable antibody includes an amino acid sequence that can serve as a substrate for a protease, usually an extracellular protease. The CM may be selected based on a protease that is produced by a tumor that is in proximity to cells that express the target and/or produced by a tumor that is co-localized in tissue with the desired target of at least one AB of the multispecific activatable antibody. A variety of different conditions are known in which a target of interest is produced by a tumor that is in proximity to cells that express the target and/or produced by a tumor that is co-localized with a protease, where the substrate of the protease is known in the art. In the example of cancer, the target tissue can be a cancerous tissue, particularly cancerous tissue of a solid tumor. There are reports in the literature of increased levels of proteases having known substrates in a number of cancers, e.g., solid tumors. See, e.g., La Rocca et al, (2004) British J. of Cancer 90(7): 1414-1421. Non-liming examples of disease include: all types of cancers (breast, lung, colorectal, prostate, melanomas, head and neck, pancreatic, etc.), rheumatoid arthritis, Crohn's disuse, SLE, cardiovascular damage, ischemia, etc. For example, indications would include leukemias, including T-cell acute lymphoblastic leukemia (T-ALL), lymphoblastic diseases including multiple myeloma, and solid tumors, including lung, colorectal, prostate, pancreatic and breast, including triple negative breast cancer. For example, indications include bone disease or metastasis in cancer, regardless of primary tumor origin; breast cancer, including by way of non-limiting example, ER/PR+ breast cancer, Her2+ breast cancer, triple-negative breast cancer; colorectal cancer; endometrial cancer; gastric cancer; glioblastoma; head and neck cancer, such as esophageal cancer; lung cancer, such as by way of non-limiting example, non-small cell lung cancer; multiple myeloma ovarian cancer; pancreatic cancer; prostate cancer; sarcoma, such as osteosarcoma; renal cancer, such as by way of nonlimiting example, renal cell carcinoma; and/or skin cancer, such as by way of nonlimiting example, squamous cell cancer, basal cell carcinoma, or melanoma. In some embodiments, the cancer is a squamous cell cancer. In some embodiments, the cancer is a skin squamous cell carcinoma. In some embodiments, the cancer is an esophageal squamous cell carcinoma. In some embodiments, the cancer is a head and neck squamous cell carcinoma. In some embodiments, the cancer is a lung squamous cell carcinoma.

[0454] The CM is specifically cleaved by an enzyme at a rate of about 0.001-1500×10⁴ M⁻¹S⁻¹ or at least 0.001, 0.005, 0.01, 0.05, 0.1, 0.5, 1, 2.5, 5, 7.5, 10, 15, 20, 25, 50, 75, 100, 125, 150, 200, 250, 500, 750, 1000, 1250, or 1500×10⁴ M⁻¹S⁻¹.

[0455] For specific cleavage by an enzyme, contact between the enzyme and CM is made. When the activatable antibody comprising an AB coupled to a MM and a CM is in the presence of target and sufficient enzyme activity, the CM can be cleaved. When the multispecific activatable antibody comprising at least a first AB coupled to a MM and a CM is in the presence of target and sufficient enzyme activity, the CM can be cleaved. Sufficient enzyme activity can refer to the ability of the enzyme to make contact with the CM and effect cleavage. It can readily be envisioned that an enzyme may be in the vicinity of the CM but unable to cleave because of other cellular factors or protein modification of the enzyme.

[0456] Exemplary substrates include but are not limited to substrates cleavable by one or more of the following enzymes or proteases in Table 3:

TABLE 3
Exemplary Proteases and/or Enzymes

ADAMS, ADAMTS, e.g.
ADAM8
ADAM9
ADAM10
ADAM12
ADAM15
ADAM17/TACE
ADAMDEC1
ADAMTS1
ADAMTS4
ADAMTS5
Aspartate proteases, e.g.,
BACE
Renin
Aspartic cathepsins, e.g.,
Cathepsin D
Cathepsin E
Caspases, e.g.,
Caspase 1
Caspase 2
Caspase 3
Caspase 4
Caspase 5
Caspase 6
Caspase 7
Caspase 8
Caspase 9
Caspase 10
Caspase 14
Cysteine cathepsins, e.g.,
Cathepsin B
Cathepsin C
Cathepsin K
Cathepsin L
Cathepsin S
Cathepsin V/L2
Cathepsin X/Z/P
Cysteine proteinases, e.g.,
Cruzipain
Legumain
Otubain-2
KLKs, e.g.,
KLK4
KLK5
KLK6
KLK7
KLK8
KLK10
KLK11
KLK13
KLK14
Metallo proteinases, e.g.,
Meprin
Neprilysin
PSMA
BMP-1
MMPs, e.g.,
MMP1
MMP2
MMP3
MMP7
MMP8
MMP9
MMP10
MMP11
MMP12
MMP13
MMP14
MMP15
MMP16
MMP17
MMP19
MMP20
MMP23
MMP24
MMP26
MMP27
Serine proteases, e.g.,
activated protein C
Cathepsin A
Cathepsin G
Chymase
coagulation factor proteases
(e.g., FVIIa, FIXa, FXa, FXIa,
FXIIa)
Elastase
Granzyme B
Guanidinobenzoatase
HtrA1
Human Neutrophil Elastase
Lactoferrin
Marapsin
NS3/4A
PACE4
Plasmin
PSA
tPA
Thrombin
Tryptase
uPA
Type II Transmembrane
Serine Proteases (TTSPs), e.g.,
DESC1
DPP-4
FAP
Hepsin
Matriptase-2
Matriptase
TMPRSS2
TMRSS3
TMPRSS4

[0457] For example, in some embodiments, the substrate is cleavable by one or more of the following enzymes or proteases: uPA, legumain, matriptase, ADAM17, BMP-1, TMPRSS3, TMPRSS4, MMP-9, MMP-12, MMP-13, and/or MMP-14. In some embodiments, the protease is selected from the group of uPA, legumain, and matriptase. In some embodiments, the protease is a matrix metalloproteinase. In some embodiments, the protease comprises uPA. In some embodiments, the protease comprises legumain. In some embodiments, the protease comprises matriptase.

[0458] In some embodiments, the CM is selected for use with a specific protease. In some embodiments, the CM is a substrate for at least one protease selected from the group consisting of an ADAM 17, a BMP-1, a cysteine protease such as a cathepsin, a HtrA1, a legumain, a matriptase (MT-SP1), a matrix metalloprotease (MMP), a neutrophil elastase, a TMPRSS, such as TMPRSS3 or TMPRSS4, a thrombin, and a u-type plasminogen activator (uPA, also referred to as urokinase).

[0459] In some embodiments, the CM is a substrate for an ADAM17. In some embodiments, the CM is a substrate for a BMP-1. In some embodiments, the CM is a substrate for a cathepsin. In some embodiments, the CM is a substrate for a cysteine protease. In some embodiments, the CM is a substrate for a HtrA1. In some embodiments, the CM is a substrate for a legumain. In some embodiments, the CM is a substrate for matriptase. In some embodiments, the CM is a substrate for a MMP. In some embodiments, the CM is a substrate for a neutrophil elastase. In some embodiments, the CM is a substrate for a thrombin. In some embodiments, the CM is a substrate for a TMPRSS. In some embodiments, the CM is a substrate for TMPRSS3. In some embodiments, the CM is a substrate for TMPRSS4. In some embodiments, the CM is a substrate for uPA.

[0460] In some embodiments, the cleavable moiety is selected for use with a specific protease, for example a protease that is known to be produced by a tumor that is in proximity to cells that express the target and/or produced by a tumor that is co-localized with the target of the activatable antibody. For example, suitable cleavable moieties for use in the activatable antibodies of the disclosure include the sequence TGRGPSWV (SEQ ID NO: 68); SARGPSRW (SEQ ID NO: 69); TARGPSFK (SEQ ID NO: 70); LSGRSDNH (SEQ ID NO: 67); GGWHTGRN (SEQ ID NO: 71); HTGRSGAL (SEQ ID NO: 72); PLTGRSGG (SEQ ID NO: 73); AARGPAIH (SEQ ID NO: 74); RGPAFNPM (SEQ ID NO: 75); SSRGPAYL (SEQ ID NO: 76); RGPATPIM (SEQ ID NO: 77); RGPA (SEQ ID NO: 78); GGQPSGMWGW (SEQ ID NO: 79); FPRPLGITGL (SEQ ID NO: 80); VHMPLGFLGP (SEQ ID NO: 81); SPLTGRSG (SEQ ID NO: 82); SAGFSLPA (SEQ ID NO: 83); LAPLGLQRR (SEQ ID NO: 84); SGGPLGVR (SEQ ID NO: 85); and/or PLGL (SEQ ID NO: 86).

[0461] In some embodiments, the CM is a substrate for at least one matrix metalloprotease (MMP). Examples of MMPs include MMP1; MMP2; MMP3; MMP7; MMP8; MMP9; MMP10; MMP11; MMP12; MMP13; MMP14; MMP15; MMP16; MMP17; MMP19; MMP20; MMP23; MMP24; MMP26; and MMP27. In some embodiments, the CM is a substrate for MMP9, MMP14, MMP1, MMP3, MMP13, MMP17, MMP11, and MMP19. In some embodiments, the CM is a substrate for MMP7. In some embodiments, the CM is a substrate for MMP9. In some embodiments, the CM is a substrate for MMP14. In some embodiments, the CM is a substrate for two or more MMPs. In some embodiments, the CM is a substrate for at least MMP9 and MMP14. In some embodiments, the CM comprises two or more substrates for the same MMP. In some embodiments, the CM comprises at least two or more MMP9 substrates. In some embodiments, the CM comprises at least two or more MMP14 substrates.

[0462] In some embodiments, the CM is a substrate for an MMP and includes the sequence ISSGLLSS (SEQ ID NO: 321); QNQALRMA (SEQ ID NO: 322); AQNLLGMV (SEQ ID NO: 323); STFPFGMF (SEQ ID NO: 324); PVGYTSSL (SEQ ID NO: 325); DWLYWPGI (SEQ ID NO: 326); MIAPVAYR (SEQ ID NO: 327); RPSPMWAY (SEQ ID NO: 328); WATPRPMR (SEQ ID NO: 329); FRLLDWQW (SEQ ID NO: 330); LKAAPRWA (SEQ ID NO: 331); GPSHLVLT (SEQ ID NO: 332); LPGGLSPW (SEQ ID NO: 333); MGLFSEAG (SEQ ID NO: 334); SPLPLRVP (SEQ ID NO: 335); RMHLRSLG (SEQ ID NO: 336); LAAPLGLL (SEQ ID NO: 337); AVGLLAPP (SEQ ID NO: 338); LLAPSHRA (SEQ ID NO: 339); PAGLWLDP (SEQ ID NO: 340); and/or ISSGLSS (SEQ ID NO: 341).

[0463] In some embodiments, the CM is a substrate for thrombin. In some embodiments, the CM is a substrate for thrombin and includes the sequence GPRSFGL (SEQ ID NO: 896) or GPRSFG (SEQ ID NO: 897).

[0464] In some embodiments, the CM comprises an amino acid sequence selected from the group consisting of NTLSGRSENHSG (SEQ ID NO: 898); NTLSGRSGNHGS (SEQ ID NO: 899); TSTSGRSANPRG (SEQ ID NO: 900); TSGRSANP (SEQ ID NO: 901); VAGRSMRP (SEQ ID NO: 902); VVPEGRRS (SEQ ID NO: 903); ILPRSPAF (SEQ ID NO: 904); MVLGRSLL (SEQ ID NO: 905); QGRAITFI (SEQ ID NO: 906); SPRSIMLA (SEQ ID NO: 907); and SMLRSMPL (SEQ ID NO: 908).

[0465] In some embodiments, the CM is a substrate for a neutrophil elastase. In some embodiments, the CM is a substrate for a serine protease. In some embodiments, the CM is a substrate for uPA. In some embodiments, the CM is a substrate for legumain. In some embodiments, the CM is a substrate for matriptase. In some embodiments, the CM is a substrate for a cysteine protease. In some embodiments, the CM is a substrate for a cysteine protease, such as a cathepsin.

[0466] In some embodiments, the CM is a CM1-CM2 substrate and includes the sequence ISSGLLSGRSDNH (SEQ ID NO: 909); ISSGLLSSGGSGGSLSGRSDNH (SEQ ID NO: 910); AVGLLAPPGGTSTSGRSANPRG (SEQ ID NO: 911); TSTSGRSANPRGGGAVGLLAPP (SEQ ID NO: 912); VHMPLGFLGPGGTSTSGRSANPRG (SEQ ID NO: 913); TSTSGRSANPRGGGVHMPLGFLGP (SEQ ID NO: 914); AVGLLAPPGGLSGRSDNH (SEQ ID NO: 915); LSGRSDNHGGAVGLLAPP (SEQ ID NO: 916); VHMPLGFLGPGGLSGRSDNH (SEQ ID NO: 917); LSGRSDNHGGVHMPLGFLGP (SEQ ID NO: 918); LSGRSDNHGGSGGSISSGLLSS (SEQ ID NO: 919); LSGRSGNHGGSGGSISSGLLSS (SEQ ID NO: 920); ISSGLLSSGGSGGSLSGRSGNH (SEQ ID NO: 921); LSGRSDNHGGSGGSQNQALRMA (SEQ ID NO: 922); QNQALRMAGGSGGSLSGRSDNH (SEQ ID NO: 923); LSGRSGNHGGSGGSQNQALRMA (SEQ ID NO: 924); QNQALRMAGGSGGSLSGRSGNH (SEQ ID NO: 925) and/or ISSGLLSGRSGNH (SEQ ID NO: 926).

[0467] In some embodiments, anti-CD3ε antibodies, activatable antibodies and/or multispecific antibodies and/or multispecific activatable antibodies of the disclosure may be made biosynthetically using recombinant DNA technology and expression in eukaryotic or prokaryotic species. For the activatable antibodies and/or multispecific activatable antibodies, the cDNAs encoding the masking moiety, linker sequence (that may include a cleavable moiety (CM), and antibody chain (heavy or light)) can be linked in an 5′ to 3′ (N- to C-terminal in the translated product) sequence to create the nucleic acid construct, which is expressed as the activatable antibody protein and/or multispecific activatable antibody protein following a conventional antibody expression process. In some embodiments, the activatable antibody and/or multispecific activatable antibody could be semi-synthetically produced by expressing a CM-antibody and then coupling the mask chemically at or near the N-terminus of the protein. In some embodiments, the activatable antibody and/or the multispecific activatable antibody could be produced by expressing an antibody and then coupling the mask and the CM chemically at or near the N-terminus of the protein such that the activatable antibody and/or at least a portion of the multispecific activatable antibody in the uncleaved state has the structural arrangement from N-terminus to C-terminus as follows: MM-CM-AB or AB-CM-MM.

[0468] Linkers suitable for use in compositions described herein are generally ones that provide flexibility of the modified AB or the multispecific activatable antibodies to facilitate the inhibition of the binding of at least the first AB to the target. Such linkers are generally referred to as flexible linkers. Suitable linkers can be readily selected and can be of any of a suitable of different lengths, such as from 1 amino acid (e.g., Gly) to 20 amino acids, from 2 amino acids to 15 amino acids, from 3 amino acids to 12 amino acids, including 4 amino acids to 10 amino acids, 5 amino acids to 9 amino acids, 6 amino acids to 8 amino acids, or 7 amino acids to 8 amino acids, and may be 1, 2, 3, 4, 5, 6, 7, 8, 9, 10, 11, 12, 13, 14, 15, 16, 17, 18, 19, or 20 amino acids in length.

[0469] Exemplary flexible linkers include glycine polymers (G)n, glycine-serine polymers (including, for example, (GS)n, (GSGGS)n (SEQ ID NO: 59) and (GGGS)n (SEQ ID NO: 60), where n is an integer of at least one), glycine-alanine polymers, alanine-serine polymers, and other flexible linkers known in the art. Glycine and glycine-serine polymers are relatively unstructured, and therefore may be able to serve as a neutral tether between components. Glycine accesses significantly more phi-psi space than even alanine, and is much less restricted than residues with longer side chains (see Scheraga, Rev. Computational Chem. 11173-142 (1992)). Exemplary flexible linkers include, but are not limited to GGSG (SEQ ID NO: 61), GGSGG(SEQ ID NO: 62), GSGSG(SEQ ID NO: 63), GSGGG(SEQ ID NO: 64), GGGSG(SEQ ID NO: 65), GSSSG (SEQ ID NO: 66), and the like. The ordinarily skilled artisan will recognize that design of an activatable antibodies can include linkers that are all or partially flexible, such that the linker can include a flexible linker as well as one or more portions that confer less flexible structure to provide for a desired activatable antibodies and/or multispecific activatable antibodies structure.

[0470] In addition to the elements described above, the activatable antibodies and/or multispecific activatable antibodies can contain additional elements such as, for example, amino acid sequence N- or C-terminal of the activatable antibodies and/or multispecific activatable antibodies. For example, activatable antibodies and/or multispecific activatable antibodies can include a targeting moiety to facilitate delivery to a cell or tissue of interest. Activatable antibodies and/or multispecific activatable antibodies can be conjugated to an agent, such as a therapeutic agent, a detectable moiety or a diagnostic agent. Examples of agents are disclosed herein.

[0471] The activatable antibodies and/or multispecific activatable antibodies can also include any of the conjugated agents, linkers and other components described herein in conjunction with an activatable antibody and/or a multispecific antibody of the disclosure, including by way of non-limiting example, any of the agents listed in Table 4 and/or any of the linkers listed in Table 5 and/or Table 6.

### Collimated Antibodies, Collimated Activatable Antibodies, Collimated Multispecific Antibodies and Collimated Multispecific Activatable Antibodies

[0472] In some embodiments, the antibodies and/or activatable antibodies of the disclosure can be conjugated to an agent, such as for example, a therapeutic agent, a detectable moiety or a diagnostic agent. Suitable therapeutic agents include, by way of non-limiting example, a therapeutic agent for use in targeting a T cell-derived lymphoma. Suitable detectable agents include, by way of non-limiting example, a fluorescent dye, (e.g. a fluorophore, Fluorescein Isothiocyanate (FITC), Rhodamine Isothiocyanate (TRITC), an Alexa Fluor® label), a near infrared (NIR) dye (e.g., Qdot® nanocrystals), a colloidal metal, a hapten, a radioactive marker, biotin and an amplification reagent such as streptavidin, or an enzyme (e.g. horseradish peroxidase or alkaline phosphatase).

[0473] The activatable anti-CD3ε antibodies have at least one point of conjugation for an agent, but in the methods and compositions provided herein less than all possible points of conjugation are available for conjugation to an agent. In some embodiments, the one or more points of conjugation are sulfur atoms involved in disulfide bonds. In some embodiments, the one or more points of conjugation are sulfur atoms involved in interchain disulfide bonds. In some embodiments, the one or more points of conjugation are sulfur atoms involved in interchain sulfide bonds, but not sulfur atoms involved in intrachain disulfide bonds. In some embodiments, the one or more points of conjugation are sulfur atoms of cysteine or other amino acid residues containing a sulfur atom. Such residues may occur naturally in the antibody structure or may be incorporated into the antibody by site-directed mutagenesis, chemical conversion, or mis-incorporation of non-natural amino acids.

[0474] Also provided are methods of preparing a conjugate of an activatable anti-CD3ε antibody having one or more interchain disulfide bonds in the AB and one or more intrachain disulfide bonds in the MM, and a drug reactive with free thiols is provided. The method generally includes partially reducing interchain disulfide bonds in the activatable antibody with a reducing agent, such as, for example, TCEP; and conjugating the drug reactive with free thiols to the partially reduced activatable antibody. As used herein, the term partial reduction refers to situations where an activatable anti-CD3ε antibody is contacted with a reducing agent and less than all disulfide bonds, e.g., less than all possible sites of conjugation are reduced. In some embodiments, less than 99%, 98%, 97%, 96%, 95%, 90%, 85%, 80%, 75%, 70%, 65%, 60%, 55%, 50%, 45%, 40%, 35%, 30%, 25%, 20%, 15%, 10% or less than 5% of all possible sites of conjugation are reduced.

[0475] In yet other embodiments, a method of reducing and conjugating an agent, e.g., a drug, to an activatable anti-CD3ε antibody resulting in selectivity in the placement of the agent is provided. The method generally includes partially reducing the activatable anti-CD3ε antibody with a reducing agent such that any conjugation sites in the masking moiety or other non-AB portion of the activatable antibody are not reduced, and conjugating the agent to interchain thiols in the AB. The conjugation site(s) are selected so as to allow desired placement of an agent to allow conjugation to occur at a desired site. The reducing agent is, for example, TCEP. The reduction reaction conditions such as, for example, the ratio of reducing agent to activatable antibody, the length of incubation, the temperature during the incubation, the pH of the reducing reaction solution, etc., are determined by identifying the conditions that produce a conjugated activatable antibody in which the MM retains the ability to effectively and efficiently mask the AB of the activatable antibody in an uncleaved state. The ratio of reduction agent to activatable anti-CD3ε antibody will vary depending on the activatable antibody. In some embodiments, the ratio of reducing agent to activatable anti-CD3ε antibody will be in a range from about 20:1 to 1:1, from about 10:1 to 1:1, from about 9:1 to 1:1, from about 8:1 to 1:1, from about 7:1 to 1:1, from about 6:1 to 1:1, from about 5:1 to 1:1, from about 4:1 to 1:1, from about 3:1 to 1:1, from about 2:1 to 1:1, from about 20:1 to 1:1.5, from about 10:1 to 1:1.5, from about 9:1 to 1:1.5, from about 8:1 to 1:1.5, from about 7:1 to 1:1.5, from about 6:1 to 1:1.5, from about 5:1 to 1:1.5, from about 4:1 to 1:1.5, from about 3:1 to 1:1.5, from about 2:1 to 1:1.5, from about 1.5:1 to 1:1.5, or from about 1:1 to 1:1.5. In some embodiments, the ratio is in a range of from about 5:1 to 1:1. In some embodiments, the ratio is in a range of from about 5:1 to 1.5:1. In some embodiments, the ratio is in a range of from about 4:1 to 1:1. In some embodiments, the ratio is in a range from about 4:1 to 1.5:1. In some embodiments, the ratio is in a range from about 8:1 to about 1:1. In some embodiments, the ratio is in a range of from about 2.5:1 to 1:1.

[0476] In some embodiments, a method of reducing interchain disulfide bonds in the AB of an activatable anti-CD3ε antibody and conjugating an agent, e.g., a thiol-containing agent such as a drug, to the resulting interchain thiols to selectively locate agent(s) on the AB is provided. The method generally includes partially reducing the AB with a reducing agent to form at least two interchain thiols without forming all possible interchain thiols in the activatable antibody; and conjugating the agent to the interchain thiols of the partially reduced AB. For example, the AB of the activatable antibody is partially reduced for about 1 hour at about 37° C. at a desired ratio of reducing agent:activatable antibody. In some embodiments, the ratio of reducing agent to activatable antibody will be in a range from about 20:1 to 1:1, from about 10:1 to 1:1, from about 9:1 to 1:1, from about 8:1 to 1:1, from about 7:1 to 1:1, from about 6:1 to 1:1, from about 5:1 to 1:1, from about 4:1 to 1:1, from about 3:1 to 1:1, from about 2:1 to 1:1, from about 20:1 to 1:1.5, from about 10:1 to 1:1.5, from about 9:1 to 1:1.5, from about 8:1 to 1:1.5, from about 7:1 to 1:1.5, from about 6:1 to 1:1.5, from about 5:1 to 1:1.5, from about 4:1 to 1:1.5, from about 3:1 to 1:1.5, from about 2:1 to 1:1.5, from about 1.5:1 to 1:1.5, or from about 1:1 to 1:1.5. In some embodiments, the ratio is in a range of from about 5:1 to 1:1. In some embodiments, the ratio is in a range of from about 5:1 to 1.5:1. In some embodiments, the ratio is in a range of from about 4:1 to 1:1. In some embodiments, the ratio is in a range from about 4:1 to 1.5:1. In some embodiments, the ratio is in a range from about 8:1 to about 1:1. In some embodiments, the ratio is in a range of from about 2.5:1 to 1:1.

[0477] The thiol-containing reagent can be, for example, cysteine or N-acetyl cysteine. The reducing agent can be, for example, TCEP. In some embodiments, the reduced activatable antibody can be purified prior to conjugation, using for example, column chromatography, dialysis, or diafiltration. In some embodiments, the reduced antibody is not purified after partial reduction and prior to conjugation.

[0478] The disclosure also provides partially reduced activatable anti-CD3ε antibodies in which at least one interchain disulfide bond in the activatable antibody has been reduced with a reducing agent without disturbing any intrachain disulfide bonds in the activatable antibody, wherein the activatable antibody includes an antibody or an antigen binding fragment thereof (AB) that specifically binds to a CD3ε target, a masking moiety (MM) that inhibits the binding of the AB of the activatable antibody in an uncleaved state to the CD3ε target, and a cleavable moiety (CM) coupled to the AB, wherein the CM is a polypeptide that functions as a substrate for a protease. In some embodiments the MM is coupled to the AB via the CM. In some embodiments, one or more intrachain disulfide bond(s) of the activatable antibody is not disturbed by the reducing agent. In some embodiments, one or more intrachain disulfide bond(s) of the MM within the activatable antibody is not disturbed by the reducing agent. In some embodiments, the activatable antibody in the uncleaved state has the structural arrangement from N-terminus to C-terminus as follows: MM-CM-AB or AB-CM-MM. In some embodiments, reducing agent is TCEP.

[0479] The compositions and methods provided herein enable the attachment of one or more agents to one or more cysteine residues in any of the AB regions without compromising the activity (e.g., the masking, activating or binding activity) of the multispecific activatable antibody. In some embodiments, the compositions and methods provided herein enable the attachment of one or more agents to one or more cysteine residues in any of the AB regions without reducing or otherwise disturbing one or more disulfide bonds within any of the MM. The compositions and methods provided herein produce a multispecific activatable antibody that is conjugated to one or more agents, e.g., any of a variety of therapeutic, diagnostic and/or prophylactic agents, preferably without any of the agent(s) being conjugated to any of the MM of the multispecific activatable antibody. The compositions and methods provided herein produce conjugated multispecific activatable antibodies in which each of the MM retains the ability to effectively and efficiently mask its corresponding AB of the multispecific activatable antibody in an uncleaved state. The compositions and methods provided herein produce conjugated multispecific activatable antibodies in which the activatable antibody is still activated, i.e., cleaved, in the presence of a protease that can cleave the CM.

[0480] The multispecific activatable antibodies have at least one point of conjugation for an agent, but in the methods and compositions provided herein less than all possible points of conjugation are available for conjugation to an agent. In some embodiments, the one or more points of conjugation are sulfur atoms involved in disulfide bonds. In some embodiments, the one or more points of conjugation are sulfur atoms involved in interchain disulfide bonds. In some embodiments, the one or more points of conjugation are sulfur atoms involved in interchain sulfide bonds, but not sulfur atoms involved in intrachain disulfide bonds. In some embodiments, the one or more points of conjugation are sulfur atoms of cysteine or other amino acid residues containing a sulfur atom. Such residues may occur naturally in the antibody structure or may be incorporated into the antibody by site-directed mutagenesis, chemical conversion, or mis-incorporation of non-natural amino acids.

[0481] Also provided are methods of preparing a conjugate of a multispecific activatable antibody having one or more interchain disulfide bonds in one or more of the AB and one or more intrachain disulfide bonds in the corresponding MM, and a drug reactive with free thiols is provided. The method generally includes partially reducing interchain disulfide bonds in the activatable antibody with a reducing agent, such as, for example, TCEP; and conjugating the drug reactive with free thiols to the partially reduced activatable antibody. As used herein, the term partial reduction refers to situations where a multispecific activatable antibody is contacted with a reducing agent and less than all disulfide bonds, e.g., less than all possible sites of conjugation are reduced. In some embodiments, less than 99%, 98%, 97%, 96%, 95%, 90%, 85%, 80%, 75%, 70%, 65%, 60%, 55%, 50%, 45%, 40%, 35%, 30%, 25%, 20%, 15%, 10% or less than 5% of all possible sites of conjugation are reduced.

[0482] In yet other embodiments, a method of reducing and conjugating an agent, e.g., a drug, to a multispecific activatable antibody resulting in selectivity in the placement of the agent is provided. The method generally includes partially reducing the multispecific activatable antibody with a reducing agent such that any conjugation sites in any of the masking moieties or other non-AB portion of the activatable antibody are not reduced, and conjugating the agent to interchain thiols in one or more of the AB regions of the multispecific activatable antibody. The conjugation site(s) are selected so as to allow desired placement of an agent to allow conjugation to occur at a desired site. The reducing agent is, for example, TCEP. The reduction reaction conditions such as, for example, the ratio of reducing agent to activatable antibody, the length of incubation, the temperature during the incubation, the pH of the reducing reaction solution, etc., are determined by identifying the conditions that produce a conjugated activatable antibody in which the MM retains the ability to effectively and efficiently mask the AB of the activatable antibody in an uncleaved state. The ratio of reduction agent to multispecific activatable antibody will vary depending on the activatable antibody. In some embodiments, the ratio of reducing agent to multispecific activatable antibody will be in a range from about 20:1 to 1:1, from about 10:1 to 1:1, from about 9:1 to 1:1, from about 8:1 to 1:1, from about 7:1 to 1:1, from about 6:1 to 1:1, from about 5:1 to 1:1, from about 4:1 to 1:1, from about 3:1 to 1:1, from about 2:1 to 1:1, from about 20:1 to 1:1.5, from about 10:1 to 1:1.5, from about 9:1 to 1:1.5, from about 8:1 to 1:1.5, from about 7:1 to 1:1.5, from about 6:1 to 1:1.5, from about 5:1 to 1:1.5, from about 4:1 to 1:1.5, from about 3:1 to 1:1.5, from about 2:1 to 1:1.5, from about 1.5:1 to 1:1.5, or from about 1:1 to 1:1.5. In some embodiments, the ratio is in a range of from about 5:1 to 1:1. In some embodiments, the ratio is in a range of from about 5:1 to 1.5:1. In some embodiments, the ratio is in a range of from about 4:1 to 1:1. In some embodiments, the ratio is in a range from about 4:1 to 1.5:1. In some embodiments, the ratio is in a range from about 8:1 to about 1:1. In some embodiments, the ratio is in a range of from about 2.5:1 to 1:1.

[0483] In some embodiments, a method of reducing interchain disulfide bonds in one or more of the AB regions of a multispecific activatable antibody and conjugating an agent, e.g., a thiol-containing agent such as a drug, to the resulting interchain thiols to selectively locate agent(s) on the AB is provided. The method generally includes partially reducing one or more of the AB regions with a reducing agent to form at least two interchain thiols without forming all possible interchain thiols in the activatable antibody; and conjugating the agent to the interchain thiols of the partially reduced AB. For example, one or more of the AB regions of the multispecific activatable antibody is partially reduced for about 1 hour at about 37° C. at a desired ratio of reducing agent:activatable antibody. In some embodiments, the ratio of reducing agent to activatable antibody will be in a range from about 20:1 to 1:1, from about 10:1 to 1:1, from about 9:1 to 1:1, from about 8:1 to 1:1, from about 7:1 to 1:1, from about 6:1 to 1:1, from about 5:1 to 1:1, from about 4:1 to 1:1, from about 3:1 to 1:1, from about 2:1 to 1:1, from about 20:1 to 1:1.5, from about 10:1 to 1:1.5, from about 9:1 to 1:1.5, from about 8:1 to 1:1.5, from about 7:1 to 1:1.5, from about 6:1 to 1:1.5, from about 5:1 to 1:1.5, from about 4:1 to 1:1.5, from about 3:1 to 1:1.5, from about 2:1 to 1:1.5, from about 1.5:1 to 1:1.5, or from about 1:1 to 1:1.5. In some embodiments, the ratio is in a range of from about 5:1 to 1:1. In some embodiments, the ratio is in a range of from about 5:1 to 1.5:1. In some embodiments, the ratio is in a range of from about 4:1 to 1:1. In some embodiments, the ratio is in a range from about 4:1 to 1.5:1. In some embodiments, the ratio is in a range from about 8:1 to about 1:1. In some embodiments, the ratio is in a range of from about 2.5:1 to 1:1.

[0484] The thiol-containing reagent can be, for example, cysteine or N-acetyl cysteine. The reducing agent can be, for example, TCEP. In some embodiments, the reduced activatable antibody can be purified prior to conjugation, using for example, column chromatography, dialysis, or diafiltration. In some embodiments, the reduced antibody is not purified after partial reduction and prior to conjugation.

[0485] The disclosure also provides partially reduced multispecific activatable antibodies in which at least one interchain disulfide bond in the multispecific activatable antibody has been reduced with a reducing agent without disturbing any intrachain disulfide bonds in the multispecific activatable antibody, wherein the multispecific activatable antibody includes at least a first antibody or an antigen binding fragment thereof (AB1) that specifically binds to a target, a first masking moiety (MM1) that inhibits the binding of the AB1 of the multispecific activatable antibody in an uncleaved state to the target, a first cleavable moiety (CM1) coupled to the AB1, wherein the CM1 is a polypeptide that functions as a substrate for a protease, and a second antibody or an antigen binding fragment thereof (AB2) that specifically binds to a second target. In some embodiments, the MM1 is coupled to the AB1 via the CM1. In some embodiments, one or more intrachain disulfide bond(s) of the multispecific activatable antibody is not disturbed by the reducing agent. In some embodiments, one or more intrachain disulfide bond(s) of the MM1 within the multispecific activatable antibody is not disturbed by the reducing agent. In some embodiments, reducing agent is TCEP.

[0486] The disclosure also pertains to immunoconjugates comprising an anti-CD3ε antibody, an activatable antibody, a multispecific antibody and/or a multispecific activatable antibody conjugated to a cytotoxic agent such as a toxin (e.g., an enzymatically active toxin of bacterial, fungal, plant, or animal origin, or fragments thereof), or a radioactive isotope (i.e., a radioconjugate). Suitable cytotoxic agents for use in targeting diseased T cells such as in a T cell-derived lymphoma include, for example, dolastatins and derivatives thereof (e.g. auristatin E, AFP, MMAD, MMAF, MMAE). For example, the cytotoxic agent is monomethyl auristatin E (MMAE). In some embodiments, the agent is monomethyl auristatin E (MMAD). In some embodiments, the agent is an agent selected from the group listed in Table 4. In some embodiments, the agent is a dolastatin. In some embodiments, the agent is an auristatin or derivative thereof. In some embodiments, the agent is auristatin E or a derivative thereof. In some embodiments, the agent is monomethyl auristatin E (MMAE). In some embodiments, the agent is monomethyl auristatin D (MMAD). In some embodiments, the agent is a maytansinoid or maytansinoid derivative. In some embodiments, the agent is DM1 or DM4. In some embodiments, the agent is a duocarmycin or derivative thereof. In some embodiments, the agent is a calicheamicin or derivative thereof. In some embodiments, the agent is a pyrrolobenzodiazepine.

[0487] Enzymatically active toxins and fragments thereof that can be used include diphtheria A chain, nonbinding active fragments of diphtheria toxin, exotoxin A chain (from Pseudomonas aeruginosa), ricin A chain, abrin A chain, modeccin A chain, alpha-sarcin, Aleurites fordii proteins, dianthin proteins, Phytolaca americana proteins (PAPI, PAPII, and PAP-S), momordica charantia inhibitor, curcin, crotin, sapaonaria officinalis inhibitor, gelonin, mitogellin, restrictocin, phenomycin, enomycin, and the tricothecenes. A variety of radionuclides are available for the production of radioconjugated antibodies. Examples include ²¹²Bi, ⁶⁴Cu, ¹²⁵I, ¹³¹I, ¹³¹In, ^{99m}Tc, ⁹⁰Y, ¹⁸⁶Re, and ⁸⁹Zr.

[0488] Conjugates of the antibody and cytotoxic agent are made using a variety of bifunctional protein-coupling agents such as N-succinimidyl-3-(2-pyridyldithiol) propionate (SPDP), iminothiolane (IT), bifunctional derivatives of imidoesters (such as dimethyl adipimidate HCL), active esters (such as disuccinimidyl suberate), aldehydes (such as glutaraldehyde), bis-azido compounds (such as bis (p-azidobenzoyl) hexanediamine), bis-diazonium derivatives (such as bis-(p-diazoniumbenzoyl)-ethylenediamine), diisocyanates (such as tolyene 2,6-diisocyanate), and bis-active fluorine compounds (such as 1,5-difluoro-2,4-dinitrobenzene). For example, a ricin immunotoxin can be prepared as described in Vitetta et al., Science 238: 1098 (1987). Carbon-14-labeled 1-isothiocyanatobenzyl-3-methyldiethylene triaminepentaacetic acid (MX-DTPA) is an exemplary chelating agent for conjugation of radionucleotide to the antibody. (See WO94/11026).

[0489] Table 4 lists some of the exemplary pharmaceutical agents that may be employed in the herein described disclosure but in no way is meant to be an exhaustive list.

TABLE 4
Exemplary Pharmaceutical Agents for Conjugation

CYTOTOXIC AGENTS
Auristatins
Auristatin E
Monomethyl auristatin D (MMAD)
Monomethyl auristatin E (MMAE)
Desmethyl auristatin E (DMAE)
Auristatin F
Monomethyl auristatin F (MMAF)
Desmethyl auristatin F (DMAF)
Auristatin derivatives, e.g., amides thereof
Auristatin tyramine
Auristatin quinolone
Dolastatins
Dolastatin derivatives
Dolastatin 16 DmJ
Dolastatin 16 Dpv
Maytansinoids, e.g. DM-1; DM-4
Maytansinoid derivatives
Duocarmycin
Duocarmycin derivatives
Alpha-amanitin
Anthracyclines
Doxorubicin
Daunorubicin
Bryostatins
Camptothecin
Camptothecin derivatives
7-substituted Camptothecin
10,11-
Difluoromethylenedioxycamptothecin
Combretastatins
Debromoaplysiatoxin
Kahalalide-F
Discodermolide
Ecteinascidins
ANTIVIRALS
Acyclovir
Vira A
Symmetrel
ANTIFUNGALS
Nystatin
ADDITIONAL ANTI-NEOPLASTICS
Adriamycin
Cerubidine
Bleomycin
Alkeran
Velban
Oncovin
Fluorouracil
Methotrexate
Thiotepa
Bisantrene
Novantrone
Thioguanine
Procarabizine
Cytarabine
ANTI-BACTERIALS
Aminoglycosides
Streptomycin
Neomycin
Kanamycin
Amikacin
Gentamicin
Tobramycin
Streptomycin B
Spectinomycin
Ampicillin
Sulfanilamide
Polymyxin
Chloramphenicol
Turbostatin
Phenstatins
Hydroxyphenstatin
Spongistatin 5
Spongistatin 7
Halistatin 1
Halistatin 2
Halistatin 3
Modified Bryostatins
Halocomstatins
Pyrrolobenzimidazoles (PBI)
Cibrostatin6
Doxaliform
Anthracyclins analogues
Cemadotin analogue (CemCH2-SH)
Pseudomonas toxin A (PE38) variant
Pseudomonas toxin A (ZZ-PE38) variant
ZJ-101
OSW-1
4-Nitrobenzyloxycarbonyl Derivatives of
O6-Benzylguanine
Topoisomerase inhibitors
Hemiasterlin
Cephalotaxine
Homoharringtonine
Pyrrolobenzodiazepine dimers (PBDs)
Functionalized pyrrolobenzodiazepenes
Calicheamicins
Podophyllotoxins
Taxanes
Vinca alkaloids
CONJUGATABLE DETECTION
REAGENTS
Fluorescein and derivatives thereof
Fluorescein isothiocyanate (FITC)
RADIOPHARMACEUTICALS
¹²⁵I
¹³¹I
⁸⁹Zr
¹¹¹In
¹²³I
¹³¹I
⁹⁹mTc
²⁰¹Tl
¹³³Xe
¹¹C
⁶²Cu
¹⁸F
⁶⁸Ga
¹³N
¹⁵O
³⁸K
⁸²Rb
⁹⁹mTc (Technetium)
HEAVY METALS
Barium
Gold
Platinum
ANTI-MYCOPLASMALS
Tylosine
Spectinomycin

[0490] Those of ordinary skill in the art will recognize that a large variety of possible moieties can be coupled to the resultant anti-CD3ε antibodies, activatable antibodies, multispecific antibodies and/or multispecific activatable antibodies of the disclosure. (See, for example, “Conjugate Vaccines”, Contributions to Microbiology and Immunology, J. M. Cruse and R. E. Lewis, Jr (eds), Carger Press, New York, (1989), the entire contents of which are incorporated herein by reference).

[0491] Coupling may be accomplished by any chemical reaction that will bind the two molecules so long as the antibody and the other moiety retain their respective activities. This linkage can include many chemical mechanisms, for instance covalent binding, affinity binding, intercalation, coordinate binding and complexation. In some embodiments, the preferred binding is, however, covalent binding. Covalent binding can be achieved either by direct condensation of existing side chains or by the incorporation of external bridging molecules. Many bivalent or polyvalent linking agents are useful in coupling protein molecules, such as the antibodies of the present disclosure, to other molecules. For example, representative coupling agents can include organic compounds such as thioesters, carbodiimides, succinimide esters, diisocyanates, glutaraldehyde, diazobenzenes and hexamethylene diamines. This listing is not intended to be exhaustive of the various classes of coupling agents known in the art but, rather, is exemplary of the more common coupling agents. (See Killen and Lindstrom, Jour. Immun. 133:1335-2549 (1984); Jansen et al., Immunological Reviews 62:185-216 (1982); and Vitetta et al., Science 238:1098 (1987).

[0492] In some embodiments, in addition to the compositions and methods provided herein, the conjugated activatable antibody can also be modified for site-specific conjugation through modified amino acid sequences inserted or otherwise included in the activatable antibody sequence. These modified amino acid sequences are designed to allow for controlled placement and/or dosage of the conjugated agent within a conjugated activatable antibody. For example, the activatable antibody can be engineered to include cysteine substitutions at positions on light and heavy chains that provide reactive thiol groups and do not negatively impact protein folding and assembly, nor alter antigen binding. In some embodiments, the activatable antibody can be engineered to include or otherwise introduce one or more non-natural amino acid residues within the activatable antibody to provide suitable sites for conjugation. In some embodiments, the activatable antibody can be engineered to include or otherwise introduce enzymatically activatable peptide sequences within the activatable antibody sequence.

[0493] Suitable linkers are described in the literature. (See, for example, Ramakrishnan, S. et al., Cancer Res. 44:201-208 (1984) describing use of MBS (M-maleimidobenzoyl-N-hydroxysuccinimide ester). See also, U.S. Pat. No. 5,030,719, describing use of halogenated acetyl hydrazide derivative coupled to an antibody by way of an oligopeptide linker. Particularly suitable linkers include: (i) SMPT (4-succinimidyloxycarbonyl-alpha-methyl-alpha-(2-pridyl-dithio)-toluene (Pierce Chem. Co., Cat. (21558G); (ii) SPDP (succinimidyl-6 [3-(2-pyridyldithio) propionamido]hexanoate (Pierce Chem. Co., Cat #21651G); and (iii) Sulfo-LC-SPDP (sulfosuccinimidyl 6 [3-(2-pyridyldithio)-propianamide] hexanoate (Pierce Chem. Co. Cat. #2165-G. Additional linkers include, but are not limited to, SMCC, sulfo-SMCC, SPDB, or sulfo-SPDB.

[0494] The linkers described above contain components that have different attributes, thus leading to conjugates with differing physio-chemical properties. For example, the linker SMPT contains a sterically hindered disulfide bond, and can form conjugates with increased stability. Disulfide linkages, are in general, less stable than other linkages because the disulfide linkage is cleaved in vitro, resulting in less conjugate available.

[0495] The reagent EDC (1-ethyl-3-(3-dimethylaminopropyl)carbodiimide hydrochloride is useful to create a carboxamide starting with a carboxylic acid and a primary or secondary amine. Thus, EDC may be used to link lysine residues in an antibody with a carboxylic acid in a linker or toxin, or to link aspartate or glutamate residues in an antibody with an amine in a linker or toxin. Such conjugation reactions utilizing EDC may be enhanced by addition of NHS (N-hydroxysuccinimide) or sulfo-NHS (N-hydroxy-3-oxysulfonylsuccinimide). Addition of NHS or sulfo-NHS to such conjugation reactions may enhance the rate, completeness, selectivity, and/or reproducibility of the conjugation reactions.

[0496] In some embodiments, the linkers are cleavable. In some embodiments, the linkers are non-cleavable. In some embodiments, two or more linkers are present. The two or more linkers are all the same, e.g., cleavable or non-cleavable, or the two or more linkers are different, e.g., at least one cleavable and at least one non-cleavable.

[0497] The present disclosure utilizes several methods for attaching agents to Abs of the anti-CD3ε antibodies, activatable antibodies, multispecific antibodies and/or multispecific activatable antibodies: (a) attachment to the carbohydrate moieties of the AB, or (b) attachment to sulfhydryl groups of the AB, or (c) attachment to amino groups of the AB, or (d) attachment to carboxylate groups of the AB. According to the disclosure, ABs may be covalently attached to an agent through an intermediate linker having at least two reactive groups, one to react with AB and one to react with the agent. The linker, which may include any compatible organic compound, can be chosen such that the reaction with AB (or agent) does not adversely affect AB reactivity and selectivity. Furthermore, the attachment of linker to agent might not destroy the activity of the agent. Suitable linkers for reaction with oxidized antibodies or oxidized antibody fragments include those containing an amine selected from the group consisting of primary amine, secondary amine, hydrazine, hydrazide, hydroxylamine, phenylhydrazine, semicarbazide and thiosemicarbazide groups. Such reactive functional groups may exist as part of the structure of the linker, or may be introduced by suitable chemical modification of linkers not containing such groups.

[0498] According to the present disclosure, suitable linkers for attachment to reduced ABs of the anti-CD3ε antibodies, activatable antibodies, multispecific antibodies and/or multispecific activatable antibodies include those having certain reactive groups capable of reaction with a sulfhydryl group of a reduced antibody or fragment. Such reactive groups include, but are not limited to: reactive haloalkyl groups (including, for example, haloacetyl groups), p-mercuribenzoate groups and groups capable of Michael-type addition reactions (including, for example, maleimides and groups of the type described by Mitra and Lawton, 1979, J. Amer. Chem. Soc. 101: 3097-3110).

[0499] According to the present disclosure, suitable linkers for attachment to neither oxidized nor reduced ABs of the anti-CD3ε antibodies, activatable antibodies, multispecific antibodies and/or multispecific activatable antibodies include those having certain functional groups capable of reaction with the primary amino groups present in unmodified lysine residues in the AB. Such reactive groups include, but are not limited to, NHS carboxylic or carbonic esters, sulfo-NHS carboxylic or carbonic esters, 4-nitrophenyl carboxylic or carbonic esters, pentafluorophenyl carboxylic or carbonic esters, acyl imidazoles, isocyanates, and isothiocyanates.

[0500] According to the present disclosure, suitable linkers for attachment to neither oxidized nor reduced ABs include those having certain functional groups capable of reaction with the carboxylic acid groups present in aspartate or glutamate residues in the AB, which have been activated with suitable reagents. Suitable activating reagents include EDC, with or without added NHS or sulfo-NHS, and other dehydrating agents utilized for carboxamide formation. In these instances, the functional groups present in the suitable linkers would include primary and secondary amines, hydrazines, hydroxylamines, and hydrazides.

[0501] The agent may be attached to the linker before or after the linker is attached to the AB. In certain applications it may be desirable to first produce an AB-linker intermediate in which the linker is free of an associated agent. Depending upon the particular application, a specific agent may then be covalently attached to the linker. In other embodiments the AB is first attached to the MM, CM and associated linkers and then attached to the linker for conjugation purposes.

[0502] Branched Linkers:

[0503] In specific embodiments, branched linkers that have multiple sites for attachment of agents are utilized. For multiple site linkers, a single covalent attachment to an AB would result in an AB-linker intermediate capable of binding an agent at a number of sites. The sites may be aldehyde or sulfhydryl groups or any chemical site to which agents can be attached.

[0504] In some embodiments, higher specific activity (or higher ratio of agents to AB) can be achieved by attachment of a single site linker at a plurality of sites on the AB. This plurality of sites may be introduced into the AB by either of two methods. First, one may generate multiple aldehyde groups and/or sulfhydryl groups in the same AB. Second, one may attach to an aldehyde or sulfhydryl of the AB a “branched linker” having multiple functional sites for subsequent attachment to linkers. The functional sites of the branched linker or multiple site linker may be aldehyde or sulfhydryl groups, or may be any chemical site to which linkers may be attached. Still higher specific activities may be obtained by combining these two approaches; that is, attaching multiple site linkers at several sites on the AB.

[0505] Cleavable Linkers:

[0506] Peptide linkers that are susceptible to cleavage by enzymes of the complement system, such as but not limited to urokinase, tissue plasminogen activator, trypsin, plasmin, or another enzyme having proteolytic activity may be used in one embodiment of the present disclosure. According to one method of the present disclosure, an agent is attached via a linker susceptible to cleavage by complement. The antibody is selected from a class that can activate complement. The antibody-agent conjugate, thus, activates the complement cascade and releases the agent at the target site. According to another method of the present disclosure, an agent is attached via a linker susceptible to cleavage by enzymes having a proteolytic activity such as a urokinase, a tissue plasminogen activator, plasmin, or trypsin. These cleavable linkers are useful in conjugated activatable antibodies that include an extracellular toxin, e.g., by way of non-limiting example, any of the extracellular toxins shown in Table 4.

[0507] Non-liming examples of cleavable linker sequences are provided in Table 5.

TABLE 5
Exemplary Linker Sequences for Conjugation

| Types of Cleavable Sequences | Amino Acid Sequence |
|---|---|
| Plasmin cleavable sequences | |
| Pro-urokinase | PRFKIIGG (SEQ ID NO: 342) |
| | PRFRIIGG (SEQ ID NO: 343) |
| TGFβ | SSRHRRALD (SEQ ID NO: 344) |
| Plasminogen | RKSSIIIRMRDVVL (SEQ ID NO: 345) |
| Staphylokinase | SSSFDKGKYKKGDDA (SEQ ID NO: 346) |
| | SSSFDKGKYKRGDDA (SEQ ID NO: 347) |
| Factor Xa cleavable sequences | IEGR (SEQ ID NO: 348) |
| | IDGR (SEQ ID NO: 349) |
| | GGSIDGR (SEQ ID NO: 350) |
| MMP cleavable sequences | |
| Gelatinase A | PLGLWA (SEQ ID NO: 351) |
| Collagenase cleavable sequences | |
| Calf skin collagen (α1(I) chain) | GPQGIAGQ (SEQ ID NO: 352) |
| Calf skin collagen (α2(I) chain) | GPQGLLGA (SEQ ID NO: 353) |
| Bovine cartilage collagen (α1(II) chain) | GIAGQ (SEQ ID NO: 354) |
| Human liver collagen (α1(III) chain) | GPLGIAGI (SEQ ID NO: 355) |
| Human α₂M | GPEGLRVG (SEQ ID NO: 356) |
| Human PZP | YGAGLGVV (SEQ ID NO: 357) |
| | AGLGVVER (SEQ ID NO: 358) |
| | AGLGISST (SEQ ID NO: 359) |
| Rat α₁M | EPQALAMS (SEQ ID NO: 360) |
| | QALAMSAI (SEQ ID NO: 361) |
| Rat α₂M | AAYHLVSQ (SEQ ID NO: 362) |
| | MDAFLESS (SEQ ID NO: 363) |
| Rat α₁I₃(2J) | ESLPVVAV (SEQ ID NO: 364) |
| Rat α₁I₃(27J) | SAPAVESE (SEQ ID NO: 365) |
| Human fibroblast collagenase | DVAQFVLT (SEQ ID NO: 366) |
| (autolytic cleavages) | VAQFVLTE (SEQ ID NO: 367) |
| | AQFVLTEG (SEQ ID NO: 368) |
| | PVQPIGPQ (SEQ ID NO: 369) |

[0508] In addition, agents may be attached via disulfide bonds (for example, the disulfide bonds on a cysteine molecule) to the AB. Since many tumors naturally release high levels of glutathione (a reducing agent) this can reduce the disulfide bonds with subsequent release of the agent at the site of delivery. In certain specific embodiments the reducing agent that would modify a CM would also modify the linker of the conjugated activatable antibody.

[0509] Spacers and Cleavable Elements:

[0510] In still another embodiment, it may be necessary to construct the linker in such a way as to optimize the spacing between the agent and the AB of the activatable antibody. This may be accomplished by use of a linker of the general structure:

W—(CH₂)n-Q

wherein
W is either —NH—CH₂— or —CH₂—;
Q is an amino acid, peptide; and
n is an integer from 0 to 20.

[0511] In still other embodiments, the linker may comprise a spacer element and a cleavable element. The spacer element serves to position the cleavable element away from the core of the AB such that the cleavable element is more accessible to the enzyme responsible for cleavage. Certain of the branched linkers described above may serve as spacer elements.

[0512] Throughout this discussion, it should be understood that the attachment of linker to agent (or of spacer element to cleavable element, or cleavable element to agent) need not be particular mode of attachment or reaction. Any reaction providing a product of suitable stability and biological compatibility is acceptable.

[0513] Serum Complement and Selection of Linkers:

[0514] According to one method of the present disclosure, when release of an agent is desired, an AB that is an antibody of a class that can activate complement is used. The resulting conjugate retains both the ability to bind antigen and activate the complement cascade. Thus, according to this embodiment of the present disclosure, an agent is joined to one end of the cleavable linker or cleavable element and the other end of the linker group is attached to a specific site on the AB. For example, if the agent has an hydroxy group or an amino group, it may be attached to the carboxy terminus of a peptide, amino acid or other suitably chosen linker via an ester or amide bond, respectively. For example, such agents may be attached to the linker peptide via a carbodimide reaction. If the agent contains functional groups that would interfere with attachment to the linker, these interfering functional groups can be blocked before attachment and deblocked once the product conjugate or intermediate is made. The opposite or amino terminus of the linker is then used either directly or after further modification for binding to an AB that is capable of activating complement.

[0515] Linkers (or spacer elements of linkers) may be of any desired length, one end of which can be covalently attached to specific sites on the AB of the activatable antibody. The other end of the linker or spacer element may be attached to an amino acid or peptide linker.

[0516] Thus when these conjugates bind to antigen in the presence of complement the amide or ester bond that attaches the agent to the linker will be cleaved, resulting in release of the agent in its active form. These conjugates, when administered to a subject, will accomplish delivery and release of the agent at the target site, and are particularly effective for the in vivo delivery of pharmaceutical agents, antibiotics, antimetabolites, antiproliferative agents and the like as presented in but not limited to those in Table 4.

[0517] Linkers for Release without Complement Activation:

[0518] In yet another application of targeted delivery, release of the agent without complement activation is desired since activation of the complement cascade will ultimately lyse the target cell. Hence, this approach is useful when delivery and release of the agent should be accomplished without killing the target cell. Such is the goal when delivery of cell mediators such as hormones, enzymes, corticosteroids, neurotransmitters, genes or enzymes to target cells is desired. These conjugates may be prepared by attaching the agent to an AB that is not capable of activating complement via a linker that is mildly susceptible to cleavage by serum proteases. When this conjugate is administered to an individual, antigen-antibody complexes will form quickly whereas cleavage of the agent will occur slowly, thus resulting in release of the compound at the target site.

[0519] Biochemical Cross Linkers:

[0520] In other embodiments, the activatable antibody may be conjugated to one or more therapeutic agents using certain biochemical cross-linkers. Cross-linking reagents form molecular bridges that tie together functional groups of two different molecules. To link two different proteins in a step-wise manner, hetero-bifunctional cross-linkers can be used that eliminate unwanted homopolymer formation.

[0521] Peptidyl linkers cleavable by lysosomal proteases are also useful, for example, Val-Cit, Val-Ala or other dipeptides. In addition, acid-labile linkers cleavable in the low-pH environment of the lysosome may be used, for example: bis-sialyl ether. Other suitable linkers include cathepsin-labile substrates, particularly those that show optimal function at an acidic pH.

[0522] Exemplary hetero-bifunctional cross-linkers are referenced in Table 6.

TABLE 6
Exemplary Hetero-Bifunctional Cross Linkers
HETERO-BIFUNCTIONAL CROSS-LINKERS

| | | | Spacer Arm |
|---|---|---|---|
| | | | Length after |
| | | | cross-linking |
| Linker | Reactive Toward | Advantages and Applications | (Angstroms) |
| SMPT | Primary amines | Greater stability | 11.2 Å |
| | Sulfhydryls | | |
| SPDP | Primary amines | Thiolation | 6.8 Å |
| | Sulfhydryls | Cleavable cross-linking | |
| LC-SPDP | Primary amines | Extended spacer arm | 15.6 Å |
| | Sulfhydryls | | |
| Sulfo-LC-SPDP | Primary amines | Extender spacer arm | 15.6 Å |
| | Sulfhydryls | Water-soluble | |
| SMCC | Primary amines | Stable maleimide reactive | 11.6 Å |
| | | group | |
| | Sulfhydryls | Enzyme-antibody conjugation | |
| | | Hapten-carrier protein | |
| | | conjugation | |
| Sulfo-SMCC | Primary amines | Stable maleimide reactive | 11.6 Å |
| | | group | |
| | Sulfhydryls | Water-soluble | |
| | | Enzyme-antibody conjugation | |
| MBS | Primary amines | Enzyme-antibody conjugation | 9.9 Å |
| | Sulfhydryls | Hapten-carrier protein | |
| | | conjugation | |
| Sulfo-MBS | Primary amines | Water-soluble | 9.9 Å |
| | Sulfhydryls | | |
| SIAB | Primary amines | Enzyme-antibody conjugation | 10.6 Å |
| | Sulfhydryls | | |
| Sulfo-SIAB | Primary amines | Water-soluble | 10.6 Å |
| | Sulfhydryls | | |
| SMPB | Primary amines | Extended spacer arm | 14.5 Å |
| | Sulfhydryls | Enzyme-antibody conjugation | |
| Sulfo-SMPB | Primary amines | Extended spacer arm | 14.5 Å |
| | Sulfhydryls | Water-soluble | |
| EDE/Sulfo-NHS | Primary amines | Hapten-Carrier conjugation | 0 |
| | Carboxyl groups | | |
| ABH | Carbohydrates | Reacts with sugar groups | 11.9 Å |
| | Nonselective | | |

[0523] Non-Cleavable Linkers or Direct Attachment:

[0524] In still other embodiments of the disclosure, the conjugate may be designed so that the agent is delivered to the target but not released. This may be accomplished by attaching an agent to an AB either directly or via a non-cleavable linker.

[0525] These non-cleavable linkers may include amino acids, peptides, D-amino acids or other organic compounds that may be modified to include functional groups that can subsequently be utilized in attachment to ABs by the methods described herein. A-general formula for such an organic linker could be

W—(CH₂)n-Q

wherein
W is either —NH—CH₂— or —CH₂—;
Q is an amino acid, peptide; and
n is an integer from 0 to 20.

[0526] Non-Cleavable Conjugates:

[0527] In some embodiments, a compound may be attached to ABs that do not activate complement. When using ABs that are incapable of complement activation, this attachment may be accomplished using linkers that are susceptible to cleavage by activated complement or using linkers that are not susceptible to cleavage by activated complement.

[0528] The antibodies disclosed herein can also be formulated as immunoliposomes. Liposomes containing the antibody are prepared by methods known in the art, such as described in Epstein et al., Proc. Natl. Acad. Sci. USA, 82: 3688 (1985); Hwang et al., Proc. Natl Acad. Sci. USA, 77: 4030 (1980); and U.S. Pat. Nos. 4,485,045 and 4,544,545. Liposomes with enhanced circulation time are disclosed in U.S. Pat. No. 5,013,556.

[0529] Particularly useful liposomes can be generated by the reverse-phase evaporation method with a lipid composition comprising phosphatidylcholine, cholesterol, and PEG-derivatized phosphatidylethanolamine (PEG-PE). Liposomes are extruded through filters of defined pore size to yield liposomes with the desired diameter. Fab′ fragments of the antibody of the present disclosure can be conjugated to the liposomes as described in Martin et al., J. Biol. Chem., 257: 286-288 (1982) via a disulfide-interchange reaction.

### Activatable Antibodies and Multispecific Activatable Antibodies Having Non-Binding Steric Moieties or Binding Partners for Non-Binding Steric Moieties

[0530] The disclosure also provides activatable antibodies and/or multispecific activatable antibodies that include non-binding steric moieties (NB) or binding partners (BP) for non-binding steric moieties, where the BP recruits or otherwise attracts the NB to the activatable antibody and/or multispecific activatable antibody. The activatable antibodies provided herein include, for example, an activatable antibody that includes a non-binding steric moiety (NB), a cleavable linker (CL) and an antibody or antibody fragment (AB) that binds a first target or epitope; a multispecific activatable antibody that includes a binding partner for a non-binding steric moiety (BP), a CL and an AB; and a multispecific activatable antibody that includes a BP to which an NB has been recruited, a CL and AB that binds a first target or epitope. The multispecific activatable antibodies provided herein include, for example, a multispecific activatable antibody that includes a non-binding steric moiety (NB), a cleavable linker (CL) and at least a first antibody or antibody fragment (AB1) that binds a first target or epitope; a multispecific activatable antibody that includes a binding partner for a non-binding steric moiety (BP), a CL and an AB1; and a multispecific activatable antibody that includes a BP to which an NB has been recruited, a CL and AB1 that binds a first target or epitope. Activatable antibodies in which the NB is covalently linked to the CL and AB or is associated by interaction with a BP that is covalently linked to the CL and AB are referred to herein as “NB-containing activatable antibodies.” Multispecific activatable antibodies in which the NB is covalently linked to the CL and AB1 or is associated by interaction with a BP that is covalently linked to the CL and AB1 are referred to herein as “NB-containing multispecific activatable antibodies.” By activatable or switchable is meant that the activatable antibody exhibits a first level of binding to a target when the activatable antibody is in an inhibited, masked or uncleaved state (i.e., a first conformation), and a second level of binding to the target when the activatable antibody is in an uninhibited, unmasked and/or cleaved state (i.e., a second conformation, i.e., activated antibody), where the second level of target binding is greater than the first level of target binding. The activatable antibody and/or multispecific activatable antibody compositions can exhibit increased bioavailability and more favorable biodistribution compared to conventional antibody therapeutics.

[0531] In some embodiments, activatable antibodies and/or multispecific activatable antibodies provide for reduced toxicity and/or adverse side effects that could otherwise result from binding of the activatable antibody and/or multispecific activatable antibody at non-treatment sites and/or non-diagnostic sites if the activatable antibody and/or multispecific activatable antibody were not masked or otherwise inhibited from binding to such a site.

[0532] Anti-CD3ε activatable antibodies that include a non-binding steric moiety (NB) can be made using the methods set forth in PCT Publication No. WO 2013/192546, the contents of which are hereby incorporated by reference in their entirety.

### Use of Anti-CD3ε, Activatable Antibodies, Multispecific Antibodies and Multispecific Activatable Antibodies

[0533] It will be appreciated that administration of therapeutic entities in accordance with the disclosure will be administered with suitable carriers, excipients, and other agents that are incorporated into formulations to provide improved transfer, delivery, tolerance, and the like. A multitude of appropriate formulations can be found in the formulary known to all pharmaceutical chemists: Remington's Pharmaceutical Sciences (15th ed., Mack Publishing Company, Easton, Pa. (1975)), particularly Chapter 87 by Blaug, Seymour, therein. These formulations include, for example, powders, pastes, ointments, jellies, waxes, oils, lipids, lipid (cationic or anionic) containing vesicles (such as Lipofectin™), DNA conjugates, anhydrous absorption pastes, oil-in-water and water-in-oil emulsions, emulsions carbowax (polyethylene glycols of various molecular weights), semi-solid gels, and semi-solid mixtures containing carbowax. Any of the foregoing mixtures may be appropriate in treatments and therapies in accordance with the present disclosure, provided that the active ingredient in the formulation is not inactivated by the formulation and the formulation is physiologically compatible and tolerable with the route of administration. See also Baldrick P. “Pharmaceutical excipient development: the need for preclinical guidance.” Regul. Toxicol Pharmacol. 32(2):210-8 (2000), Wang W. “Lyophilization and development of solid protein pharmaceuticals.” Int. J. Pharm. 203(1-2):1-60 (2000), Charman W N “Lipids, lipophilic drugs, and oral drug delivery-some emerging concepts.” J Pharm Sci. 89(8):967-78 (2000), Powell et al. “Compendium of excipients for parenteral formulations” PDA J Pharm Sci Technol. 52:238-311 (1998) and the citations therein for additional information related to formulations, excipients and carriers well known to pharmaceutical chemists.

[0534] In one embodiment, an anti-CD3ε antibody, an activatable antibody, a multispecific antibody and/or a multispecific activatable antibody of the disclosure may be used as therapeutic agents. Such agents will generally be employed to diagnose, prognose, monitor, treat, alleviate, and/or prevent a disease or pathology in a subject. A therapeutic regimen is carried out by identifying a subject, e.g., a human patient or other mammal suffering from (or at risk of developing) a disorder using standard methods. An anti-CD3ε antibody and/or an activatable antibody preparation is administered to the subject and will generally have an effect due to its binding with the CD3ε. A multispecific antibody and/or a multispecific activatable antibody preparation, for example in some embodiments, one having high specificity and high affinity for its two or more target antigens, is administered to the subject and will generally have an effect due to its binding with the targets. Administration of anti-CD3ε antibody, an activatable antibody, a multispecific antibody and/or a multispecific activatable antibody may activate T cells via engagement of CD3ε on the T cells. Administration of anti-CD3ε antibody, an activatable antibody, a multispecific antibody and/or a multispecific activatable antibody may agonize, stimulate, activate, and/or augment CD3-mediated T cell activation.

[0535] Generally, alleviation or treatment of a disease or disorder involves the lessening of one or more symptoms or medical problems associated with the disease or disorder. For example, in the case of cancer, the therapeutically effective amount of the drug can accomplish one or a combination of the following: reduce the number of cancer cells; reduce the tumor size; inhibit (i.e., to decrease to some extent and/or stop) cancer cell infiltration into peripheral organs; inhibit tumor metastasis; inhibit, to some extent, tumor growth; and/or relieve to some extent one or more of the symptoms associated with the cancer. In some embodiments, a composition of this disclosure can be used to prevent the onset or reoccurrence of the disease or disorder in a subject, e.g., a human or other mammal, such as a non-human primate, companion animal (e.g., cat, dog, horse), farm animal, work animal, or zoo animal. The terms subject and patient are used interchangeably herein.

[0536] A therapeutically effective amount of an anti-CD3ε antibody, an activatable antibody, a multispecific antibody and/or a multispecific activatable antibody of the disclosure relates generally to the amount needed to achieve a therapeutic objective. As noted above, this may be a binding interaction between the anti-CD3ε antibody, the activatable antibody, the multispecific antibody and/or a multispecific activatable antibody and its target antigens that, in certain cases, agonize, stimulate, activate, and/or augment CD3-mediated T cell activation. The amount required to be administered will furthermore depend on the binding affinity of the anti-CD3ε antibody, the activatable antibody, the multispecific antibody and/or a multispecific activatable antibody for its specific antigen, and will also depend on the rate at which an administered anti-CD3ε antibody, activatable antibody, multispecific antibody and/or multispecific activatable antibody is depleted from the free volume other subject to which it is administered. Common ranges for therapeutically effective dosing of an anti-CD3ε antibody, an activatable antibody, a multispecific antibody and/or antibody fragment and/or a multispecific activatable antibody of the disclosure may be, by way of nonlimiting example, from about 0.01 μg/kg body weight to about 10 mg/kg body weight. In some embodiments, the therapeutically effective dosing of an anti-CD3ε antibody, an activatable antibody, a multispecific antibody and/or antibody fragment and/or a multispecific activatable antibody of the disclosure may be, by way of nonlimiting example, from about 0.01 mg/kg body weight to about 5-10 mg/kg body weight. Common dosing frequencies may range, for example, from twice daily to once a week.

[0537] Efficaciousness of treatment is determined in association with any known method for diagnosing or treating the particular disorder. Methods for the screening of anti-CD3ε antibodies, activatable antibodies, multispecific antibodies and/or multispecific activatable antibodies that possess the desired specificity include, but are not limited to, enzyme linked immunosorbent assay (ELISA) and other immunologically mediated techniques known within the art.

[0538] In another embodiment, an anti-CD3ε antibody, an activatable antibody, a multispecific antibody and/or a multispecific activatable antibody directed two or more targets are used in methods known within the art relating to the localization and/or quantitation of the targets (e.g., for use in measuring levels of one or more of the targets within appropriate physiological samples, for use in diagnostic methods, for use in imaging the protein, and the like). In a given embodiment, an anti-CD3ε antibody, an activatable antibody, a multispecific antibody and/or a multispecific activatable antibody directed two or more targets, or a derivative, fragment, analog or homolog thereof, that contain the antibody derived antigen binding domain, are utilized as pharmacologically active compounds (referred to hereinafter as “Therapeutics”).

[0539] In another embodiment, an anti-CD3ε antibody, an activatable antibody, a multispecific antibody and/or a multispecific activatable antibody directed two or more targets is used to isolate one or more of the targets by standard techniques, such as immunoaffinity, chromatography or immunoprecipitation. An anti-CD3ε antibody, an activatable antibody, a multispecific antibody and/or a multispecific activatable antibody directed two or more targets (or a fragment thereof) are used diagnostically to monitor protein levels in tissue as part of a clinical testing procedure, e.g., to determine the efficacy of a given treatment regimen. Detection can be facilitated by coupling (i.e., physically linking) the antibody to a detectable substance. Examples of detectable substances include various enzymes, prosthetic groups, fluorescent materials, luminescent materials, bioluminescent materials, and radioactive materials. Examples of suitable enzymes include horseradish peroxidase, alkaline phosphatase, β-galactosidase, or acetylcholinesterase; examples of suitable prosthetic group complexes include streptavidin/biotin and avidin/biotin; examples of suitable fluorescent materials include umbelliferone, fluorescein, fluorescein isothiocyanate, rhodamine, dichlorotriazinylamine fluorescein, dansyl chloride or phycoerythrin; an example of a luminescent material includes luminol; examples of bioluminescent materials include luciferase, luciferin, and aequorin, and examples of suitable radioactive material include ¹²⁵I, ¹³¹I, ³⁵S or ³H.

[0540] In yet another embodiment, an anti-CD3ε antibody, an activatable antibody, a multispecific antibody and/or a multispecific activatable antibody directed two or more targets can be used as an agent for detecting the presence of one or more of the targets (or a fragment thereof) in a sample. In some embodiments, the antibody contains a detectable label. Antibodies are polyclonal, or in some embodiments, monoclonal. An intact antibody, or a fragment thereof (e.g., F_{ab}, scFv, or F_{(ab)2}) is used. The term “labeled”, with regard to the probe or antibody, is intended to encompass direct labeling of the probe or antibody by coupling (i.e., physically linking) a detectable substance to the probe or antibody, as well as indirect labeling of the probe or antibody by reactivity with another reagent that is directly labeled. Examples of indirect labeling include detection of a primary antibody using a fluorescently-labeled secondary antibody and end-labeling of an antibody with biotin such that it can be detected with fluorescently-labeled streptavidin. The term “biological sample” is intended to include tissues, cells and biological fluids isolated from a subject, as well as tissues, cells and fluids present within a subject. Included within the usage of the term “biological sample”, therefore, is blood and a fraction or component of blood including blood serum, blood plasma, or lymph. That is, the detection method of the disclosure can be used to detect a protein in a biological sample in vitro as well as in vivo. For example, in vitro techniques for detection of an analyte protein include enzyme linked immunosorbent assays (ELISAs), Western blots, immunoprecipitations, and immunofluorescence. Procedures for conducting immunoassays are described, for example in “ELISA: Theory and Practice: Methods in Molecular Biology”, Vol. 42, J. R. Crowther (Ed.) Human Press, Totowa, N. J., 1995; “Immunoassay”, E. Diamandis and T. Christopoulus, Academic Press, Inc., San Diego, Calif., 1996; and “Practice and Theory of Enzyme Immunoassays”, P. Tijssen, Elsevier Science Publishers, Amsterdam, 1985. Furthermore, in vivo techniques for detection of an analyte protein include introducing into a subject a labeled anti-analyte protein antibody. For example, the antibody can be labeled with a radioactive marker whose presence and location in a subject can be detected by standard imaging techniques.

[0541] The anti-CD3ε antibody, the activatable antibody, the multispecific antibodies and/or multispecific activatable antibodies of the disclosure are also useful in a variety of diagnostic and prophylactic formulations. In one embodiment, an anti-CD3ε antibody, an activatable antibody, a multispecific antibody and/or multispecific activatable antibody is administered to patients that are at risk of developing one or more of the aforementioned disorders. A patient's or organ's predisposition to one or more of the disorders can be determined using genotypic, serological or biochemical markers.

[0542] In another embodiment of the disclosure, an anti-CD3ε antibody, an activatable antibody, a multispecific antibody and/or multispecific activatable antibody is administered to human individuals diagnosed with a clinical indication associated with one or more of the aforementioned disorders. Upon diagnosis, an anti-CD3ε antibody, an activatable antibody, a multispecific antibody and/or multispecific activatable antibody is administered to mitigate or reverse the effects of the clinical indication.

[0543] Anti-CD3ε antibodies, activatable antibodies, multispecific antibodies and/or multispecific activatable antibodies are also useful in the detection of one or more targets in patient samples and accordingly are useful as diagnostics. For example, the anti-CD3ε antibodies, the activatable antibodies, the multispecific antibodies and/or multispecific activatable antibodies of the disclosure are used in in vitro assays, e.g., ELISA, to detect one or more target levels in a patient sample.

[0544] In one embodiment, an anti-CD3ε antibody, an activatable antibody, a multispecific antibody and/or multispecific activatable antibody is immobilized on a solid support (e.g., the well(s) of a microtiter plate). The immobilized antibody and/or activatable antibody serves as a capture antibody for any target(s) that may be present in a test sample. Prior to contacting the immobilized anti-CD3ε antibody, activatable antibody, multispecific antibody and/or immobilized multispecific activatable antibody with a patient sample, the solid support is rinsed and treated with a blocking agent such as milk protein or albumin to prevent nonspecific adsorption of the analyte.

[0545] Subsequently the wells are treated with a test sample suspected of containing the antigen, or with a solution containing a standard amount of the antigen. Such a sample is, e.g., a serum sample from a subject suspected of having levels of circulating antigen considered to be diagnostic of a pathology. After rinsing away the test sample or standard, the solid support is treated with a second antibody that is detectably labeled. The labeled second antibody serves as a detecting antibody. The level of detectable label is measured, and the concentration of target antigen(s) in the test sample is determined by comparison with a standard curve developed from the standard samples.

[0546] It will be appreciated that based on the results obtained using the anti-CD3ε antibody, the activatable antibody, the multispecific antibody and/or multispecific activatable antibody in an in vitro diagnostic assay, it is possible to stage a disease in a subject based on expression levels of the target antigen(s). For a given disease, samples of blood are taken from subjects diagnosed as being at various stages in the progression of the disease, and/or at various points in the therapeutic treatment of the disease. Using a population of samples that provides statistically significant results for each stage of progression or therapy, a range of concentrations of the antigen that may be considered characteristic of each stage is designated.

[0547] Anti-CD3ε antibodies, activatable antibodies, multispecific antibodies and/or multispecific activatable antibodies can also be used in diagnostic and/or imaging methods. In some embodiments, such methods are in vitro methods. In some embodiments, such methods are in vivo methods. In some embodiments, such methods are in situ methods. In some embodiments, such methods are ex vivo methods. For example, activatable antibodies and/or multispecific activatable antibodies having an enzymatically cleavable CM can be used to detect the presence or absence of an enzyme that is capable of cleaving the CM. Such activatable antibodies and/or multispecific activatable antibodies can be used in diagnostics, which can include in vivo detection (e.g., qualitative or quantitative) of enzyme activity (or, in some embodiments, an environment of increased reduction potential such as that which can provide for reduction of a disulfide bond) through measured accumulation of multispecific activated antibodies (i.e., antibodies resulting from cleavage of an activatable antibody and/or a multispecific activatable antibody) in a given cell or tissue of a given host organism. Such accumulation of activated multispecific antibodies indicates not only that the tissue expresses enzymatic activity (or an increased reduction potential depending on the nature of the CM) but also that the tissue expresses at least one target to which the activated antibody binds.

[0548] For example, the CM can be selected to be a protease substrate for a protease found at the site of a tumor, at the site of a viral or bacterial infection at a biologically confined site (e.g., such as in an abscess, in an organ, and the like), and the like. At least one of the AB can be one that binds a target antigen. Using methods familiar to one skilled in the art, a detectable label (e.g., a fluorescent label or radioactive label or radiotracer) can be conjugated to an AB or other region of a multispecific antibody and/or multispecific activatable antibody. Suitable detectable labels are discussed in the context of the above screening methods and additional specific examples are provided below. Using at least one AB specific to a protein or peptide of the disease state, along with a protease whose activity is elevated in the disease tissue of interest, activatable antibodies will exhibit an increased rate of binding to disease tissue relative to tissues where the CM specific enzyme is not present at a detectable level or is present at a lower level than in disease tissue or is inactive (e.g., in zymogen form or in complex with an inhibitor). Since small proteins and peptides are rapidly cleared from the blood by the renal filtration system, and because the enzyme specific for the CM is not present at a detectable level (or is present at lower levels in non-disease tissues or is present in inactive conformation), accumulation of activated multispecific antibodies in the disease tissue is enhanced relative to non-disease tissues.

[0549] In another example, activatable antibodies and/or activatable multispecific antibodies can be used to detect the presence or absence of a cleaving agent in a sample. For example, where the activatable antibodies and/or multispecific activatable antibodies contain a CM susceptible to cleavage by an enzyme, the multispecific activatable antibodies can be used to detect (either qualitatively or quantitatively) the presence of an enzyme in the sample. In another example, where the activatable antibodies and/or multispecific activatable antibodies contain a CM susceptible to cleavage by reducing agent, the activatable antibodies and/or multispecific activatable antibodies can be used to detect (either qualitatively or quantitatively) the presence of reducing conditions in a sample. To facilitate analysis in these methods, the activatable antibodies and/or multispecific activatable antibodies can be detectably labeled, and can be bound to a support (e.g., a solid support, such as a slide or bead). The detectable label can be positioned on a portion of the activatable antibody and/or multispecific activatable antibody that is not released following cleavage, for example, the detectable label can be a quenched fluorescent label or other label that is not detectable until cleavage has occurred. The assay can be conducted by, for example, contacting the immobilized, detectably labeled activatable antibodies and/or multispecific activatable antibodies with a sample suspected of containing an enzyme and/or reducing agent for a time sufficient for cleavage to occur, then washing to remove excess sample and contaminants. The presence or absence of the cleaving agent (e.g., enzyme or reducing agent) in the sample is then assessed by a change in detectable signal of the activatable antibodies and/or multispecific activatable antibodies prior to contacting with the sample e.g., the presence of and/or an increase in detectable signal due to cleavage of the activatable antibody and/or multispecific activatable antibody by the cleaving agent in the sample.

[0550] Such detection methods can be adapted to also provide for detection of the presence or absence of a target that is capable of binding at least one AB of the multispecific activatable antibodies when cleaved. Thus, the assays can be adapted to assess the presence or absence of a cleaving agent and the presence or absence of a target of interest. The presence or absence of the cleaving agent can be detected by the presence of and/or an increase in detectable label of the multispecific activatable antibodies as described above, and the presence or absence of the target can be detected by detection of a target-AB complex e.g., by use of a detectably labeled anti-target antibody.

[0551] Activatable antibodies and/or multispecific activatable antibodies are also useful in in situ imaging for the validation of activatable antibody activation, e.g., by protease cleavage, and binding to a particular target. In situ imaging is a technique that enables localization of proteolytic activity and target in biological samples such as cell cultures or tissue sections. Using this technique, it is possible to confirm both binding to a given target and proteolytic activity based on the presence of a detectable label (e.g., a fluorescent label).

[0552] These techniques are useful with any frozen cells or tissue derived from a disease site (e.g. tumor tissue) or healthy tissues. These techniques are also useful with fresh cell or tissue samples.

[0553] In these techniques, an activatable antibody and/or multispecific activatable antibody is labeled with a detectable label. The detectable label may be a fluorescent dye, (e.g. a fluorophore, Fluorescein Isothiocyanate (FITC), Rhodamine Isothiocyanate (TRITC), an Alexa Fluor® label), a near infrared (NIR) dye (e.g., Qdot® nanocrystals), a colloidal metal, a hapten, a radioactive marker, biotin and an amplification reagent such as streptavidin, or an enzyme (e.g. horseradish peroxidase or alkaline phosphatase).

[0554] Detection of the label in a sample that has been incubated with the labeled, multispecific activatable antibody indicates that the sample contains the target and contains a protease that is specific for the CM of the activatable antibody and/or multispecific activatable antibody. In some embodiments, the presence of the protease can be confirmed using broad spectrum protease inhibitors such as those described herein, and/or by using an agent that is specific for the protease, for example, an antibody such as A11, which is specific for the protease matriptase (MT-SP1) and inhibits the proteolytic activity of matriptase; see e.g., International Publication Number WO 2010/129609, published 11 Nov. 2010. The same approach of using broad spectrum protease inhibitors such as those described herein, and/or by using a more selective inhibitory agent can be used to identify a protease or class of proteases specific for the CM of the activatable antibody and/or multispecific activatable antibody. In some embodiments, the presence of the target can be confirmed using an agent that is specific for the target or the detectable label can be competed with unlabeled target. In some embodiments, unlabeled activatable antibody and/or multispecific activatable antibody could be used, with detection by a labeled secondary antibody or more complex detection system.

[0555] Similar techniques are also useful for in vivo imaging where detection of the fluorescent signal in a subject, e.g., a mammal, including a human, indicates that the disease site contains the target and contains a protease that is specific for the CM of the activatable antibody and/or multispecific activatable antibody.

[0556] These techniques are also useful in kits and/or as reagents for the detection, identification or characterization of protease activity in a variety of cells, tissues, and organisms based on the protease-specific CM in the multispecific activatable antibody.

Therapeutic Administration and Formulations of Anti-CD3ε Antibodies, Activatable Antibodies, Multispecific Antibodies and/or Multispecific Activatable Antibodies

[0557] It will be appreciated that administration of therapeutic entities in accordance with the disclosure will be administered with suitable carriers, excipients, and other agents that are incorporated into formulations to provide improved transfer, delivery, tolerance, and the like. A multitude of appropriate formulations can be found in the formulary known to all pharmaceutical chemists: Remington's Pharmaceutical Sciences (15th ed., Mack Publishing Company, Easton, Pa. (1975)), particularly Chapter 87 by Blaug, Seymour, therein. These formulations include, for example, powders, pastes, ointments, jellies, waxes, oils, lipids, lipid (cationic or anionic) containing vesicles (such as Lipofectin™), DNA conjugates, anhydrous absorption pastes, oil-in-water and water-in-oil emulsions, emulsions carbowax (polyethylene glycols of various molecular weights), semi-solid gels, and semi-solid mixtures containing carbowax. Any of the foregoing mixtures may be appropriate in treatments and therapies in accordance with the present disclosure, provided that the active ingredient in the formulation is not inactivated by the formulation and the formulation is physiologically compatible and tolerable with the route of administration. See also Baldrick P. “Pharmaceutical excipient development: the need for preclinical guidance.” Regul. Toxicol Pharmacol. 32(2):210-8 (2000), Wang W. “Lyophilization and development of solid protein pharmaceuticals.” Int. J. Pharm. 203(1-2):1-60 (2000), Charman W N “Lipids, lipophilic drugs, and oral drug delivery-some emerging concepts.” J Pharm Sci. 89(8):967-78 (2000), Powell et al. “Compendium of excipients for parenteral formulations” PDA J Pharm Sci Technol. 52:238-311 (1998) and the citations therein for additional information related to formulations, excipients and carriers well known to pharmaceutical chemists.

[0558] In some embodiments, the anti-CD3ε antibodies, the conjugated anti-CD3ε antibodies, the activatable antibodies, the conjugated activatable antibodies, the multispecific antibodies, the multispecific activatable antibodies and/or the conjugated multispecific activatable antibody compositions—referred to collectively herein as the Therapeutic(s)—are administered in conjunction with one or more additional agents, or a combination of additional agents. Suitable additional agents include current pharmaceutical and/or surgical therapies for an intended application. For example, the Therapeutic(s) can be used in conjunction with an additional chemotherapeutic or anti-neoplastic agent. For example, the Therapeutic(s) and additional agent are formulated into a single therapeutic composition, and the Therapeutic(s) and additional agent are administered simultaneously. In some embodiments, the Therapeutic(s) and additional agent are separate from each other, e.g., each is formulated into a separate therapeutic composition, and the Therapeutic(s) and the additional agent are administered simultaneously, or the Therapeutic(s) and the additional agent are administered at different times during a treatment regimen. For example, the Therapeutic(s) is administered prior to the administration of the additional agent, the Therapeutic(s) is administered subsequent to the administration of the additional agent, or the Therapeutic(s) and the additional agent are administered in an alternating fashion. As described herein, the Therapeutic(s) and additional agent are administered in single doses or in multiple doses.

[0559] In some embodiments, the additional agent is coupled or otherwise attached to the Therapeutic(s).

[0560] Suitable additional agents are selected according to the purpose of the intended application (i.e., killing, prevention of cell proliferation, hormone therapy or gene therapy). Such agents may include but is not limited to, for example, pharmaceutical agents, toxins, fragments of toxins, alkylating agents, enzymes, antibiotics, antimetabolites, antiproliferative agents, hormones, neurotransmitters, DNA, RNA, siRNA, oligonucleotides, antisense RNA, aptamers, diagnostics, radiopaque dyes, radioactive isotopes, fluorogenic compounds, magnetic labels, nanoparticles, marker compounds, lectins, compounds that alter cell membrane permeability, photochemical compounds, small molecules, liposomes, micelles, gene therapy vectors, viral vectors, and the like. Finally, combinations of agents or combinations of different classes of agents may be used.

[0561] The anti-CD3ε antibodies, the conjugated anti-CD3ε antibodies, the activatable antibodies, the conjugated activatable antibodies, the multispecific antibodies, the multispecific activatable antibodies and/or the conjugated multispecific activatable antibody compositions of the disclosure (also referred to herein as “Therapeutic(s)” or “active compounds”), and derivatives, fragments, analogs and homologs thereof, can be incorporated into pharmaceutical compositions suitable for administration. Principles and considerations involved in preparing such compositions, as well as guidance in the choice of components are provided, for example, in Remington's Pharmaceutical Sciences: The Science And Practice Of Pharmacy 19th ed. (Alfonso R. Gennaro, et al., editors) Mack Pub. Co., Easton, Pa.: 1995; Drug Absorption Enhancement: Concepts, Possibilities, Limitations, And Trends, Harwood Academic Publishers, Langhorne, Pa., 1994; and Peptide And Protein Drug Delivery (Advances In Parenteral Sciences, Vol. 4), 1991, M. Dekker, New York.

[0562] Such compositions typically comprise the anti-CD3ε antibodies, the conjugated anti-CD3ε antibodies, the activatable antibodies, the conjugated activatable antibodies, the multispecific antibodies, the multispecific activatable antibodies and/or the conjugated multispecific activatable antibody compositions and a pharmaceutically acceptable carrier. Where an antibody, activatable antibody, multispecific antibody and/or a multispecific activatable antibody includes a fragment of the AB domain, the smallest fragment of the AB that specifically binds to the binding domain of the target protein can be used. For example, based upon the variable-region sequences of an antibody, peptide molecules can be designed that retain the ability of the AB to bind the target protein sequence. Such peptides can be synthesized chemically and/or produced by recombinant DNA technology. (See, e.g., Marasco et al., Proc. Natl. Acad. Sci. USA, 90: 7889-7893 (1993)).

[0563] As used herein, the term “pharmaceutically acceptable carrier” is intended to include any and all solvents, dispersion media, coatings, antibacterial and antifungal agents, isotonic and absorption delaying agents, and the like, compatible with pharmaceutical administration. Suitable carriers are described in the most recent edition of Remington's Pharmaceutical Sciences, a standard reference text in the field, which is incorporated herein by reference. Suitable examples of such carriers or diluents include, but are not limited to, water, saline, ringer's solutions, dextrose solution, and 5% human serum albumin. Liposomes and non-aqueous vehicles such as fixed oils may also be used. The use of such media and agents for pharmaceutically active substances is well known in the art. Except insofar as any conventional media or agent is incompatible with the active compound, use thereof in the compositions is contemplated.

[0564] The formulations to be used for in vivo administration must be sterile. This is readily accomplished by filtration through sterile filtration membranes.

[0565] A pharmaceutical composition of the disclosure is formulated to be compatible with its intended route of administration. Examples of routes of administration include parenteral, e.g., intravenous, intradermal, subcutaneous, oral (e.g., inhalation), transdermal (i.e., topical), transmucosal, and rectal administration. Solutions or suspensions used for parenteral, intradermal, or subcutaneous application can include the following components: a sterile diluent such as water for injection, saline solution, fixed oils, polyethylene glycols, glycerine, propylene glycol or other synthetic solvents; antibacterial agents such as benzyl alcohol or methyl parabens; antioxidants such as ascorbic acid or sodium bisulfite; chelating agents such as ethylenediaminetetraacetic acid (EDTA); buffers such as acetates, citrates or phosphates, and agents for the adjustment of tonicity such as sodium chloride or dextrose. The pH can be adjusted with acids or bases, such as hydrochloric acid or sodium hydroxide. The parenteral preparation can be enclosed in ampoules, disposable syringes or multiple dose vials made of glass or plastic.

[0566] Pharmaceutical compositions suitable for injectable use include sterile aqueous solutions (where water soluble) or dispersions and sterile powders for the extemporaneous preparation of sterile injectable solutions or dispersion. For intravenous administration, suitable carriers include physiological saline, bacteriostatic water, Cremophor EL™ (BASF, Parsippany, N.J.) or phosphate buffered saline (PBS). In all cases, the composition must be sterile and should be fluid to the extent that easy syringeability exists. It must be stable under the conditions of manufacture and storage and must be preserved against the contaminating action of microorganisms such as bacteria and fungi. The carrier can be a solvent or dispersion medium containing, for example, water, ethanol, polyol (for example, glycerol, propylene glycol, and liquid polyethylene glycol, and the like), and suitable mixtures thereof. The proper fluidity can be maintained, for example, by the use of a coating such as lecithin, by the maintenance of the required particle size in the case of dispersion and by the use of surfactants. Prevention of the action of microorganisms can be achieved by various antibacterial and antifungal agents, for example, parabens, chlorobutanol, phenol, ascorbic acid, thimerosal, and the like. In many cases, it will be suitable to include isotonic agents, for example, sugars, polyalcohols such as manitol, sorbitol, sodium chloride in the composition. Prolonged absorption of the injectable compositions can be brought about by including in the composition an agent that delays absorption, for example, aluminum monostearate and gelatin.

[0567] Sterile injectable solutions can be prepared by incorporating the active compound in the required amount in an appropriate solvent with one or a combination of ingredients enumerated above, as required, followed by filtered sterilization. Generally, dispersions are prepared by incorporating the active compound into a sterile vehicle that contains a basic dispersion medium and the required other ingredients from those enumerated above. In the case of sterile powders for the preparation of sterile injectable solutions, methods of preparation are vacuum drying and freeze-drying that yields a powder of the active ingredient plus any additional desired ingredient from a previously sterile-filtered solution thereof.

[0568] Oral compositions generally include an inert diluent or an edible carrier. They can be enclosed in gelatin capsules or compressed into tablets. For the purpose of oral therapeutic administration, the active compound can be incorporated with excipients and used in the form of tablets, troches, or capsules. Oral compositions can also be prepared using a fluid carrier for use as a mouthwash, wherein the compound in the fluid carrier is applied orally and swished and expectorated or swallowed. Pharmaceutically compatible binding agents, and/or adjuvant materials can be included as part of the composition. The tablets, pills, capsules, troches and the like can contain any of the following ingredients, or compounds of a similar nature: a binder such as microcrystalline cellulose, gum tragacanth or gelatin; an excipient such as starch or lactose, a disintegrating agent such as alginic acid, Primogel, or corn starch; a lubricant such as magnesium stearate or Sterotes; a glidant such as colloidal silicon dioxide; a sweetening agent such as sucrose or saccharin; or a flavoring agent such as peppermint, methyl salicylate, or orange flavoring.

[0569] For administration by inhalation, the compounds are delivered in the form of an aerosol spray from pressured container or dispenser that contains a suitable propellant, e.g., a gas such as carbon dioxide, or a nebulizer.

[0570] Systemic administration can also be by transmucosal or transdermal means. For transmucosal or transdermal administration, penetrants appropriate to the barrier to be permeated are used in the formulation. Such penetrants are generally known in the art, and include, for example, for transmucosal administration, detergents, bile salts, and fusidic acid derivatives. Transmucosal administration can be accomplished through the use of nasal sprays or suppositories. For transdermal administration, the active compounds are formulated into ointments, salves, gels, or creams as generally known in the art.

[0571] The compounds can also be prepared in the form of suppositories (e.g., with conventional suppository bases such as cocoa butter and other glycerides) or retention enemas for rectal delivery.

[0572] In one embodiment, the active compounds are prepared with carriers that will protect the compound against rapid elimination from the body, such as sustained/controlled release formulations, including implants and microencapsulated delivery systems. Biodegradable, biocompatible polymers can be used, such as ethylene vinyl acetate, polyanhydrides, polyglycolic acid, collagen, polyorthoesters, and polylactic acid. Methods for preparation of such formulations will be apparent to those skilled in the art.

[0573] For example, the active ingredients can be entrapped in microcapsules prepared, for example, by coacervation techniques or by interfacial polymerization, for example, hydroxymethylcellulose or gelatin-microcapsules and poly-(methylmethacrylate) microcapsules, respectively, in colloidal drug delivery systems (for example, liposomes, albumin microspheres, microemulsions, nano-particles, and nanocapsules) or in macroemulsions.

[0574] Sustained-release preparations can be prepared. Suitable examples of sustained-release preparations include semipermeable matrices of solid hydrophobic polymers containing the antibody, which matrices are in the form of shaped articles, e.g., films, or microcapsules. Examples of sustained-release matrices include polyesters, hydrogels (for example, poly(2-hydroxyethyl-methacrylate), or poly(vinylalcohol)), polylactides (U.S. Pat. No. 3,773,919), copolymers of L-glutamic acid and γ ethyl-L-glutamate, non-degradable ethylene-vinyl acetate, degradable lactic acid-glycolic acid copolymers such as the LUPRON DEPOT™ (injectable microspheres composed of lactic acid-glycolic acid copolymer and leuprolide acetate), and poly-D-(−)-3-hydroxybutyric acid. While polymers such as ethylene-vinyl acetate and lactic acid-glycolic acid enable release of molecules for over 100 days, certain hydrogels release proteins for shorter time periods.

[0575] The materials can also be obtained commercially from Alza Corporation and Nova Pharmaceuticals, Inc. Liposomal suspensions (including liposomes targeted to infected cells with monoclonal antibodies to viral antigens) and can also be used as pharmaceutically acceptable carriers. These can be prepared according to methods known to those skilled in the art, for example, as described in U.S. Pat. No. 4,522,811.

[0576] It is especially advantageous to formulate oral or parenteral compositions in dosage unit form for ease of administration and uniformity of dosage. Dosage unit form as used herein refers to physically discrete units suited as unitary dosages for the subject to be treated; each unit containing a predetermined quantity of active compound calculated to produce the desired therapeutic effect in association with the required pharmaceutical carrier. The specification for the dosage unit forms of the disclosure are dictated by and directly dependent on the unique characteristics of the active compound and the particular therapeutic effect to be achieved, and the limitations inherent in the art of compounding such an active compound for the treatment of individuals.

[0577] The pharmaceutical compositions can be included in a container, pack, or dispenser together with instructions for administration.

[0578] The formulation can also contain more than one active compound as necessary for the particular indication being treated, for example, those with complementary activities that do not adversely affect each other. In some embodiments, or in addition, the composition can comprise an agent that enhances its function, such as, for example, a cytotoxic agent, cytokine, chemotherapeutic agent, or growth-inhibitory agent. Such molecules are suitably present in combination in amounts that are effective for the purpose intended.

[0579] In one embodiment, the active compounds are administered in combination therapy, i.e., combined with other agents, e.g., therapeutic agents, that are useful for treating pathological conditions or disorders, such as autoimmune disorders and inflammatory diseases. The term “in combination” in this context means that the agents are given substantially contemporaneously, either simultaneously or sequentially. If given sequentially, at the onset of administration of the second compound, the first of the two compounds is still detectable at effective concentrations at the site of treatment.

[0580] For example, the combination therapy can include one or more antibodies of the disclosure coformulated with, and/or coadministered with, one or more additional therapeutic agents, e.g., one or more cytokine and growth factor inhibitors, immunosuppressants, anti-inflammatory agents, metabolic inhibitors, enzyme inhibitors, and/or cytotoxic or cytostatic agents, as described in more detail below. Furthermore, one or more antibodies described herein may be used in combination with two or more of the therapeutic agents described herein. Such combination therapies may advantageously utilize lower dosages of the administered therapeutic agents, thus avoiding possible toxicities or complications associated with the various monotherapies.

[0581] In other embodiments, one or more antibodies of the disclosure can be coformulated with, and/or coadministered with, one or more anti-inflammatory drugs, immunosuppressants, or metabolic or enzymatic inhibitors. Nonlimiting examples of the drugs or inhibitors that can be used in combination with the antibodies described herein, include, but are not limited to, one or more of: nonsteroidal anti-inflammatory drug(s) (NSAIDs), e.g., ibuprofen, tenidap, naproxen, meloxicam, piroxicam, diclofenac, and indomethacin; sulfasalazine; corticosteroids such as prednisolone; cytokine suppressive anti-inflammatory drug(s) (CSAIDs); inhibitors of nucleotide biosynthesis, e.g., inhibitors of purine biosynthesis, folate antagonists (e.g., methotrexate (N-[4-[[(2,4-diamino-6-pteridinyl)methyl] methylamino] benzoyl]-L-glutamic acid); and inhibitors of pyrimidine biosynthesis, e.g., dihydroorotate dehydrogenase (DHODH) inhibitors. Suitable therapeutic agents for use in combination with the antibodies of the disclosure include NSAIDs, CSAIDs, (DHODH) inhibitors (e.g., leflunomide), and folate antagonists (e.g., methotrexate).

[0582] Examples of additional inhibitors include one or more of: corticosteroids (oral, inhaled and local injection); immunosuppressants, e.g., cyclosporin, tacrolimus (FK-506); and mTOR inhibitors, e.g., sirolimus (rapamycin—RAPAMUNE™ or rapamycin derivatives, e.g., soluble rapamycin derivatives (e.g., ester rapamycin derivatives, e.g., CCI-779); agents that interfere with signaling by proinflammatory cytokines such as TNFα or IL-1 (e.g. IRAK, NIK, IKK, p38 or MAP kinase inhibitors); COX2 inhibitors, e.g., celecoxib, rofecoxib, and variants thereof; phosphodiesterase inhibitors, e.g., R973401 (phosphodiesterase Type IV inhibitor); phospholipase inhibitors, e.g., inhibitors of cytosolic phospholipase 2 (cPLA2) (e.g., trifluoromethyl ketone analogs); inhibitors of vascular endothelial cell growth factor or growth factor receptor, e.g., VEGF inhibitor and/or VEGF-R inhibitor; and inhibitors of angiogenesis. Suitable therapeutic agents for use in combination with the antibodies of the disclosure are immunosuppressants, e.g., cyclosporin, tacrolimus (FK-506); mTOR inhibitors, e.g., sirolimus (rapamycin) or rapamycin derivatives, e.g., soluble rapamycin derivatives (e.g., ester rapamycin derivatives, e.g., CCI-779); COX2 inhibitors, e.g., celecoxib and variants thereof; and phospholipase inhibitors, e.g., inhibitors of cytosolic phospholipase 2 (cPLA2), e.g., trifluoromethyl ketone analogs.

[0583] Additional examples of therapeutic agents that can be combined with an antibody of the disclosure include one or more of: 6-mercaptopurines (6-MP); azathioprine sulphasalazine; mesalazine; olsalazine; chloroquine/hydroxychloroquine (PLAQUENIL®); pencillamine; aurothiornalate (intramuscular and oral); azathioprine; coichicine; beta-2 adrenoreceptor agonists (salbutamol, terbutaline, salmeteral); xanthines (theophylline, arninophylline); cromoglycate; nedocromil; ketotifen; ipratropium and oxitropium; mycophenolate mofetil; adenosine agonists; antithrombotic agents; complement inhibitors; and adrenergic agents.

[0584] All publications and patent documents cited herein are incorporated herein by reference as if each such publication or document was specifically and individually indicated to be incorporated herein by reference. Citation of publications and patent documents is not intended as an admission that any is pertinent prior art, nor does it constitute any admission as to the contents or date of the same. The invention having now been described by way of written description, those of skill in the art will recognize that the invention can be practiced in a variety of embodiments and that the foregoing description and examples below are for purposes of illustration and not limitation of the claims that follow.

### EXAMPLES

### Example 1

### Activatable Anti-CD3ε Antibody Masking Moieties

[0585] This Example describes identification of masking moieties (MM) to reduce binding of activatable anti-CD3ε antibodies to their target.

### MACS1 and MACS2 Selections

[0586] Anti-CD3ε antibody SP34 (also referred to herein as SP34 antibody) was used to screen a peptide library inserted into a circularly permuted outer membrane protein OmpX in E. coli with 6×10¹⁰ members, using a method similar to the bacterial display technology described in PCT International Publication Numbers WO 2005/047461, published May 26, 2005, and WO 2009/014726, published Jan. 29, 2009. The selection involved two rounds of magnetic activated cell separation (MACS) followed by two different fluorescent activated cell sorting (FACS) based selection strategies. FIG. 1 shows the generic naming scheme for MACS and FACS populations during a selection process: Magnetic activated cell separations (MACS) are denoted with an “M” and fluorescent activated cell sorting (FACS) selections are denoted with an “F”. The order of the abbreviation indicates the order of selections/sorts and the number indicates the number of rounds of that type of selection/sort to which that the population has been subjected. For example, an M2F3 population has gone through 2 rounds of MACS selections followed by 3 rounds of FACS selections. The starting population that undergoes selection to yield a given population is assumed to be N−1 of the right most sort indicator in the nomenclature. For example, the population that was sorted to produce the M2F3 population is assumed to have been the M2F2 population.

[0587] The initial MACS (M1) was done using protein-G Dynabeads (Invitrogen Cat#: 10003D) and the SP34 antibody (available from BD Biosciences Cat#556610) at a concentration of 100 nM. For the M1, 6×10¹¹ cells were screened for binding and 6.6×10⁷ cells were collected. The second round of MACS sorting (M2) was done in a manner similar to the first round with the following differences. The SP34 antibody was added to a final concentration of 50 nM, and a total of 4.5×10¹¹ cells were screened for binding and 3.1×10⁵ cells were collected.

### FACS Selections

### Selection #1

[0588] For all FACS selections, 50 μl of induced culture were spun down (5 min @ 3000×g) and labeled with the indicated concentration of antibody. For the M2, MACS2FACS1 (M2F1), and MACS2FACS2 (M2F2) selections cells were labeled with 1 nM of SP34-dylight-488 (ThermoScientific Cat#: 53025) in 500 μl PBS, 0.5% BSA, and the top 0.5% of positive cells were sorted by fluorescent activated cell sorting (FACS) using a FACSARIAI instrument (BD Biosciences). For the M2 sort, 3×10⁶ cells were sorted and 5000 cells were collected. For subsequent sorts, at least 1×10⁶ cells were sorted. The MACS2FACS3 (M2F3) population was sorted as described herein, but with the addition of 100 nM unlabeled isotype control antibody (BD Biosciences Cat#: 556657). The final MACS2FACS4 (M2F4) round of FACS selection was sorted as before but was labeled using unlabeled SP34 antibody labeled with an anti-mouse IgG-488 secondary 1:100 (Jackson ImmunoResearch Cat#: 315-486-045), resulting in the MACS2FACS5 (M2F5) population. The final M2F5 population was verified to specifically bind SP34 by demonstrating inhibition of 1 nM SP34-dylight-488 binding in the presence of 100 nM soluble human CD3ε protein (Sino Biologics Cat#: 10977-H08H). One hundred individual clones were chosen for sequence analysis, and 91 gave interpretable data. The results are summarized in Table 7.

TABLE 7
Selection #1 M2F5 sequences

| Peptide name | Peptide sequence (occurrence) |
|---|---|
| 14995 | YSLWGCEWGCDRGLY(73) (SEQ ID NO: 371) |
| 15003 | GYRWGCEWNCGGITT(8) (SEQ ID NO: 372) |
| 15253 | YSACEMFGEVECCFC(7) (SEQ ID NO: 373) |
| 15263 | WYSGGCEAFCGILSS(2) (SEQ ID NO: 374) |
| 15286 | GYSGGCEFRCYQLYS(1) (SEQ ID NO: 375) |

### Selection #2

[0589] For all FACS selections, 50 μl of induced culture were spun down (5 min @ 3000×g) and labeled with the indicated concentration of antibody. The M2, M2F1, and M2F2 sorts, cells were labeled with 10 nM SP34-dylight-488 in 500 μL PBS, 0.5% BSA, 100 nM unlabeled isotype control antibody as described herein, and the top 10%, 38%, and 60% of binders were sorted, respectively. In each case, approximately 3×10⁶ cells were sorted. Twenty individual clones were chosen for sequence analysis, and 19 gave interpretable data. The results are summarized in Table 8.

TABLE 8
Selection # 2 M2F2 sequences

| Sequence name | Peptide Sequence |
|---|---|
| 15855 | KFCHCGYYCRVCTLK(1) (SEQ ID NO: 376) |
| 15856 | LGCNNLWGNEFCHPV(1) (SEQ ID NO: 377) |
| 15858 | GHPCWGNESYCHTHS(1) (SEQ ID NO: 378) |
| 15859 | GNNKWCNKPCKCWNK(1) (SEQ ID NO: 379) |
| 15860 | VYYCGGNESLCGERR(1) (SEQ ID NO: 380) |
| 15861 | WMTFGCEFSCGTDEW(1) (SEQ ID NO: 381) |
| 15862 | VYHWGCEYDCFFNDM(1) (SEQ ID NO: 382) |
| 15863 | FSGCCRGWYNCCHRG(1) (SEQ ID NO: 383) |
| 15864 | FMCQQRMWGNEFCHQ(1) (SEQ ID NO: 384) |
| 15865 | MMYCGGNEVLCGPRV(1) (SEQ ID NO: 385) |
| 15866 | TYSKCRYTVKCTKHN(1) (SEQ ID NO: 386) |
| 15867 | WYSGGCEAFCGILSS(2) (SEQ ID NO: 387) |
| 15868 | KYHCTRTSACCTKHH(1) (SEQ ID NO: 388) |
| 15869 | NCFDPYMLLTYSCNS(1) (SEQ ID NO: 389) |
| 15870 | GMCGNLWGDESRCWW(1) (SEQ ID NO: 390) |
| 15857 | SCWDPYMMMNYICNI(3) (SEQ ID NO: 391) |

### On Cell Peptide Characterization

[0590] Eight peptides, 5 from the selection #1 M2F5 and 3 from the selection #2 M2F2 populations, were selected for further characterization on cell. The individual clones were labeled with 100, 10, 1, and 0.1 nM SP34-dylight-488 in the presence of 100 nM unlabeled isotype control antibody as described herein. Each clone was separately labeled with yPet-Mona to quantify the cell surface expression level of the peptides, allowing the calculation of expression normalized binding.

$$Expression normalized binding - \frac{Mean Fab fluorescence}{Mean YpetMona fluorescence}$$

And it's assumed that:

MeanYpetMona fluorescence=Peptide expression level

[0591] To verify the ability of the binding peptides to inhibit SP34's interaction with human CD3ε, each clone was labeled with 1 nM SP34-dylight-488 in the presence of 100 nM human CD3ε. The results are summarized in Table 9. All of the peptides evaluated specifically bound to SP34-dylight-488 and were inhibited from binding by excess free human CD3ε.

TABLE 9
Expression normalized binding of individual SP34 binding clones

| Label | 14995 | 15003 | 15253 | 15263 | 15286 | 15860 | 15864 | 15865 |
|---|---|---|---|---|---|---|---|---|
| 100 nM | 0.51 | 0.69 | 2.53 | 2.28 | 1.72 | 4.55 | 1.88 | 2.24 |
| SP34 | | | | | | | | |
| 10 nM | 0.11 | 0.39 | 0.98 | 0.69 | 0.66 | 1.72 | 0.63 | 1.08 |
| SP34 | | | | | | | | |
| 1 nM | 0.13 | 0.20 | 0.68 | 0.35 | 0.42 | 0.52 | 0.36 | 0.79 |
| SP34 | | | | | | | | |
| 0.1 nM | 0.08 | 0.11 | 0.55 | 0.24 | 0.28 | 0.48 | 0.15 | 0.21 |
| SP34 | | | | | | | | |
| 1 nM | 0.08 | 0.12 | 0.53 | 0.34 | 0.34 | 0.51 | 0.30 | 0.26 |
| SP34 + | | | | | | | | |
| 100 nM | | | | | | | | |
| hCD3ε | | | | | | | | |

### Example 2

### Activatable Anti-CD3ε Antibodies

[0592] This Example describes the production of activatable anti-CD3ε antibodies of the disclosure.

[0593] The expression vector for the SP34scFv(LvHv)-Fc fusion construct was assembled using standard molecular biology techniques. Briefly, a DNA fragment encoding the SP34 scFv (LvHv) region was amplified with primers CX2005 and CX2008 using a synthesized SP34scFv(LvHv) sequence as template. The DNA encoding the Fc domain was amplified from the pFIL-CHIg-hGl vector (Invitrogen) using primers CX2007 and CX2006. The overlapping fragments were combined and amplified with primers CX2005 and CX2006 and subsequently cloned into the pOP Hyg expression vector (a modified pCDNA3.1 expression vector (Invitrogen)) using the EcoRI and NotI restriction sites to form antibody SP34scFv(LvHv)-Fc. A DNA fragment encoding antibody SP34scFv(HvLv)-Fc was produced in a similar manner with the following differences. The DNA fragment encoding the PSP34scFv(HvLv) was amplified using the primers CX2001 and CX200,4 and the DNA encoding the Fc domain was amplified using the primers CX2002 and CX2003. The overlapping fragments were combined and amplified using primers CX2001 and C2002. All primer sequences are shown in Table 10. Antibodies SP34scFv(LvHv)-Fc and SP34scFv(HvLv)-Fc were found to bind to Jurkat T cells with affinities similar to the ability of SP34 IgG to bind to Jurkat T cells. FIGS. 4A-4C depicts scFv(LvHv)-Fc and scFv(HvLv)-Fc antibodies and activatable antibodies of the disclosure.

[0594] Antibodies SP34scFv(LvHv)-Fc and SP34scFv(HvLv)-Fc were also tested for their ability to bind to cynomolgus macaque (also referred to herein as cyno) CD3ε. To determine if antibodies SP34scFv(LvHv)-Fc and SP34scFv(HvLv)-Fc could bind to cynomolgus CD3ε, an ELISA-based binding assay was performed. Recombinant cynomolgus (Macaca fascicularis) CD3ε with a polyhistidine affinity tag at the C-terminus (Sino Biological, Catalog 90047-C08H) was coated in 50 μl PBS (PBS, Gibco Life Technologies, Catalog 20012-043) onto 96-well, flat bottom plates (Maxisorb Nunc, Thermo Scientific, Catalog 12-565-226) overnight at a concentration of 0.1 μg/ml at 4° C. The plates were washed 3 times with 250 μl/well PBS-T (Tween 20 at 0.05%), blocked with 200 μl PBS-T 2% BSA (BSA Fraction V, Fisher Scientific, product BP1600-1) for 1 hour at ambient temperature and washed 3 times with 250 μl/well PBS-T. Using 50 μl/well, either antibody SP34scFv(LvHv)-Fc or SP34scFv(HvLv)-Fc (purified to >95% monomer) was incubated in a concentration range from 37 nM to 0.017 nM diluted into PBS-T 2% BSA for 1 hour at ambient temperature. The plates were washed three times with 250 μl/well PBS-T, incubated with the secondary anti-human Fc-HRP 1/5000 dilution into PBS-T 2% BSA (Peroxidase AffiniPure Mouse Anti-Human IgG, Fey Fragment Specific, Jackson ImmunoResearch, Catalog 209-035-098) for 30 minutes at ambient temperature and washed 3 times with 250 μl/well PBS-T. HRP substrate (TMB-ELISA, Thermo Scientific, Product 34029) was added to the plate at 50 μl/well for 2 minutes and then quenched with 50 μl/well 1 M HCl before reading absorbance at 450 nM on the Tecan infinite 200Pro and analyzed with Prism 6 (GraphPad) by curve fitting the data to log(agonist) vs. response (three parameters). On a separate cyno CD3ε coated ELISA plate, SP34 mouse antibody (SP34-2, BD Biosciences, Catalog 551916) was coated and analyzed in the same manner and using the secondary anti-mouse IgG-HRP conjugate (Jackson ImmunoResearch, Catalog 715-035-150). FIGS. 2A and 2B demonstrate that scFv antibodies SP34scFv(LvHv)-Fc and SP34scFv(HvLv)-Fc as well as antibody SP34-2 bound to cynomolgus CD3εHIS within a similar range of EC₅₀ between 0.1 and 0.3 nM.

[0595] The vectors encoding activatable antibody SP34scFv(LvHv)-Fc were constructed as follows. The overlapping forward primers CX2013 and CX2014 and reverse primer CX2014 were used to amplify the activatable scFv antibody using the SP34scFv(LvHv)-Fc construct as template. The DNA fragment was then cloned into the SP34scFv(LvHv)-Fc vector using the EcoR1 and BstXI restriction sites. Using the SP34scFv(LvHv)-Fc fusion vector as template, the masking peptide sequences were added using the forward primers CX2041-CX2045 for peptides 15003, 15263, 15860, 15864, and 15865, respectively, and the reverse primer CX2002 and subsequently cloned using the SfiI and NotI restriction sites to produce nucleic acid molecules encoding activatable anti-CD3ε antibodies.

TABLE 10
Primer sequences

| PRIMER | |
|---|---|
| NAME | PRIMER SEQUENCE |
| CX2001 | ACTTGTCACGAATTCGGAAGTGCAGCTGGTGGAATCTGGGGGCGGAC |
| | TGGTGCAGCCT (SEQ ID NO: 392) |
| CX2002 | TAGACTCGAGCGGCCGCTCATTTACCCGGAGACAGGGAGAGGCTCTT |
| | C (SEQ ID NO: 393) |
| CX2003 | TCGGCGGAGGCACCAAGCTGACCGTGCTGGGCGGCTCCCTGGACCCT |
| | AAGTCATCTGACAAAACTCACACATGCCCA (SEQ ID NO: 394) |
| CX2004 | TGGGCATGTGTGAGTTTTGTCAGATGACTTAGGGTCCAGGGAGCCGCC |
| | CAGCACGGTCAGCTTGGTGCCTCCGCCGA (SEQ ID NO: 395) |
| CX2005 | TGCACTTGTCACGAATTCGCAGGCTGTCGTGACACAGGAAAGCGCCCT |
| | GA (SEQ ID NO: 396) |
| CX2006 | TCTAGACTCGAGCGGCCGCTCATTTACCCGGAGACAGGGAGAGGCTC |
| | TTCT (SEQ ID NO: 397) |
| CX2007 | TGGGGCCAGGGCACCCTCGTGACAGTGTCTGCTGGCGGCTCCCTGGAC |
| | CCTAAGTCATCTGACAAAACTCACACATGCCCA (SEQ ID NO: 398) |
| CX2008 | TGGGCATGTGTGAGTTTTGTCAGATGACTTAGGGTCCAGGGAGCCGCC |
| | AGCAGACACTGTCACGAGGGTGCCCTGGCCCCA (SEQ ID NO: 399) |
| CX2012 | AGCGGTGGCTCTGGTGGTCTGAGCGGCCGTTCCGATAATCATGGCGGC |
| | GGTTCTCAGGCTGTCGTGACACAGGAAAGCGCCCTGACCACCA (SEQ |
| | ID NO: 400) |
| CX2013 | CTAAGTCTTGCACTTGTCACGAATTCGCAAGGCCAGTCTGGCCAAGGG |
| | TACCAAGGCTCGAGCGGTGGCAGCGGTGGCT (SEQ ID NO: 401) |
| CX2014 | TCCGGGCCACCCATTCCAGTCCCTTGCCAGGGGCCTGGCGCACCCAAT |
| | TCATGGCGTAGGTGTT (SEQ ID NO: 402) |
| CX2041 | CAAGGCCAGTCTGGCCAAGGTTATCGGTGGGGTTGCGAGTGGAATTG |
| | CGGTGGGATTACTACTGGCTCGAGCGGTGGCAGCGGTGGC (SEQ ID |
| | NO: 403) |
| CX2042 | CAAGGCCAGTCTGGCCAATGGTATTCGGGTGGGTGCGAGGCTTTTTGC |
| | GGTATTTTGTCGTCGGGCTCGAGCGGTGGCAGCGGTGGC (SEQ ID |
| | NO: 404) |
| CX2043 | CAAGGCCAGTCTGGCCAAGTTTATTATTGCGGTGGGAATGAGAGTCTG |
| | TGCGGTGAGAGGAGGGGCTCGAGCGGTGGCAGCGGTGGC (SEQ ID |
| | NO: 405) |
| CX2044 | CAAGGCCAGTCTGGCCAATTTATGTGCCAGCAGCGGATGTGGGGGAA |
| | TGAGTTTTGCCATCAGGGCTCGAGCGGTGGCAGCGGTGGC (SEQ ID |
| | NO: 406) |
| CX2045 | CAAGGCCAGTCTGGCCAAATGATGTATTGCGGTGGGAATGAGGTGTT |
| | GTGCGGGCCGCGGGTTGGCTCGAGCGGTGGCAGCGGTGGC (SEQ ID |
| | NO: 370) |

SP34 Lv
Nucleotide sequence
(SEQ ID NO: 1)
CAGGCTGTCGTGACACAGGAAAGCGCCCTGACCACCAGCCCTGGCGAGACAGTGACCCTGACCTGCAGATCTAGCAC
AGGCGCCGTGACCACAAGCAACTACGCCAACTGGGTGCAGGAAAAGCCCGACCACCTGTTCACCGGCCTGATCGGCG
GCACCAACAAAAGGGCTCCAGGCGTGCCAGCCAGATTCAGCGGCAGCCTGATTGGCGATAAGGCCGCCCTGACAATC
ACTGGCGCCCAGACCGAGGACGAGGCCATCTACTTTTGCGCCCTGTGGTACAGCAACCTGTGGGTGTTCGGCGGAGG
CACCAAGCTGACAGTGCTG
Amino Acid sequence
(SEQ ID NO: 2)
QAVVTQESALTTSPGETVTLTCRSSTGAVTTSNYANWVQEKPDHLFTGLIGGTNKRAPGVPARFSGSLIGDKAALTI
TGAQTEDEAIYFCALWYSNLWVFGGGTKLTVL
SP34 Hv
Nucleotide sequence
(SEQ ID NO: 3)
GAAGTGCAGCTGGTGGAATCTGGCGGCGGACTGGTGCAGCCTAAGGGCTCTCTGAAGCTGAGCTGTGCCGCCAGCGG
CTTCACCTTCAACACCTACGCCATGAATTGGGTGCGCCAGGCCCCTGGCAAGGGACTGGAATGGGTGGCCCGGATCA
GAAGCAAGTACAACAATTACGCCACCTACTACGCCGACAGCGTGAAGGACCGGTTCACCATCAGCCGGGACGACAGC
CAGAGCATCCTGTATCTGCAGATGAACAACCTGAAAACCGAGGACACCGCCATGTACTACTGCGTGCGGCACGGCAA
CTTCGGCAACAGCTATGTGTCTTGGTTTGCCTACTGGGGCCAGGGCACCCTCGTGACAGTGTCTGCT
Amino Acid sequence
(SEQ ID NO: 4)
EVQLVESGGGLVQPKGSLKLSCAASGFTFNTYAMNWVRQAPGKGLEWVARIRSKYNNYATYYADSVKDRFTISRDDS
QSILYLQMNNLKTEDTAMYYCVRHGNFGNSYVSWFAYWGQGTLVTVSA
SP34scFv(LvHv)
Nucleotide sequence
(SEQ ID NO: 5)
CAGGCTGTCGTGACACAGGAAAGCGCCCTGACCACCAGCCCTGGCGAGACAGTGACCCTGACCTGCAGATCTAGCAC
AGGCGCCGTGACCACAAGCAACTACGCCAACTGGGTGCAGGAAAAGCCCGACCACCTGTTCACCGGCCTGATCGGCG
GCACCAACAAAAGGGCTCCAGGCGTGCCAGCCAGATTCAGCGGCAGCCTGATTGGCGATAAGGCCGCCCTGACAATC
ACTGGCGCCCAGACCGAGGACGAGGCCATCTACTTTTGCGCCCTGTGGTACAGCAACCTGTGGGTGTTCGGCGGAGG
CACCAAGCTGACAGTGCTGGGAGGCGGAGGATCTGGCGGAGGCGGAAGTGGCGGAGGGGGATCTGAAGTGCAGCTGG
TGGAATCTGGCGGCGGACTGGTGCAGCCTAAGGGCTCTCTGAAGCTGAGCTGTGCCGCCAGCGGCTTCACCTTCAAC
ACCTACGCCATGAATTGGGTGCGCCAGGCCCCTGGCAAGGGACTGGAATGGGTGGCCCGGATCAGAAGCAAGTACAA
CAATTACGCCACCTACTACGCCGACAGCGTGAAGGACCGGTTCACCATCAGCCGGGACGACAGCCAGAGCATCCTGT
ATCTGCAGATGAACAACCTGAAAACCGAGGACACCGCCATGTACTACTGCGTGCGGCACGGCAACTTCGGCAACAGC
TATGTGTCTTGGTTTGCCTACTGGGGCCAGGGCACCCTCGTGACAGTGTCTGCT
Amino Acid sequence
(SEQ ID NO: 6)
QAVVTQESALTTSPGETVTLTCRSSTGAVTTSNYANWVQEKPDHLFTGLIGGTNKRAPGVPARFSGSLIGDKAALTI
TGAQTEDEAIYFCALWYSNLWVFGGGTKLTVLGGGGSGGGGSGGGGSEVQLVESGGGLVQPKGSLKLSCAASGFTFN
TYAMNWVRQAPGKGLEWVARIRSKYNNYATYYADSVKDRFTISRDDSQSILYLQMNNLKTEDTAMYYCVRHGNFGNS
YVSWFAYWGQGTLVTVSA
Antibody SP34scFv(LvHv)-Fc fusion
Nucleotide sequence
(SEQ ID NO: 7)
CAGGCTGTCGTGACACAGGAAAGCGCCCTGACCACCAGCCCTGGCGAGACAGTGACCCTGACCTGCAGATCTAGCAC
AGGCGCCGTGACCACAAGCAACTACGCCAACTGGGTGCAGGAAAAGCCCGACCACCTGTTCACCGGCCTGATCGGCG
GCACCAACAAAAGGGCTCCAGGCGTGCCAGCCAGATTCAGCGGCAGCCTGATTGGCGATAAGGCCGCCCTGACAATC
ACTGGCGCCCAGACCGAGGACGAGGCCATCTACTTTTGCGCCCTGTGGTACAGCAACCTGTGGGTGTTCGGCGGAGG
CACCAAGCTGACAGTGCTGGGAGGCGGAGGATCTGGCGGAGGCGGAAGTGGCGGAGGGGGATCTGAAGTGCAGCTGG
TGGAATCTGGCGGCGGACTGGTGCAGCCTAAGGGCTCTCTGAAGCTGAGCTGTGCCGCCAGCGGCTTCACCTTCAAC
ACCTACGCCATGAATTGGGTGCGCCAGGCCCCTGGCAAGGGACTGGAATGGGTGGCCCGGATCAGAAGCAAGTACAA
CAATTACGCCACCTACTACGCCGACAGCGTGAAGGACCGGTTCACCATCAGCCGGGACGACAGCCAGAGCATCCTGT
ATCTGCAGATGAACAACCTGAAAACCGAGGACACCGCCATGTACTACTGCGTGCGGCACGGCAACTTCGGCAACAGC
TATGTGTCTTGGTTTGCCTACTGGGGCCAGGGCACCCTCGTGACAGTGTCTGCTGGCGGCTCCCTGGACCCTAAGTC
ATCTGACAAAACTCACACATGCCCACCGTGCCCAGCACCTGAACTCCTGGGGGGACCGTCAGTCTTCCTCTTCCCCC
CAAAACCCAAGGACACCCTCATGATCTCCCGGACCCCTGAGGTCACATGCGTGGTGGTGGACGTGAGCCACGAAGAC
CCTGAGGTCAAGTTCAACTGGTACGTGGACGGCGTGGAGGTGCATAATGCCAAGACAAAGCCGCGGGAGGAGCAGTA
CAACAGCACGTACCGTGTGGTCAGCGTCCTCACCGTCCTGCACCAGGACTGGCTGAATGGCAAGGAGTACAAGTGCA
AGGTCTCCAACAAAGCCCTCCCAGCCCCCATCGAGAAAACCATCTCCAAAGCCAAAGGGCAGCCCCGAGAACCACAG
GTGTACACCCTGCCCCCATCCCGGGAGGAGATGACCAAGAACCAGGTCAGCCTGACCTGCCTGGTCAAAGGCTTCTA
TCCCAGCGACATCGCCGTGGAGTGGGAGAGCAATGGGCAGCCGGAGAACAACTACAAGACCACGCCTCCCGTGCTGG
ACTCCGACGGCTCCTTCTTCCTCTACAGCAAGCTCACCGTGGACAAGAGCAGGTGGCAGCAGGGGAACGTCTTCTCA
TGCTCCGTGATGCATGAGGCTCTGCACAACCACTACACGCAGAAGAGCCTCTCCCTGTCTCCGGGTAAA
Amino Acid sequence
(SEQ ID NO: 8)
QAVVTQESALTTSPGETVTLTCRSSTGAVTTSNYANWVQEKPDHLFTGLIGGTNKRAPGVPARFSGSLIGDKAALTI
TGAQTEDEAIYFCALWYSNLWVFGGGTKLTVLGGGGSGGGGSGGGGSEVQLVESGGGLVQPKGSLKLSCAASGFTFN
TYAMNWVRQAPGKGLEWVARIRSKYNNYATYYADSVKDRFTISRDDSQSILYLQMNNLKTEDTAMYYCVRHGNFGNS
YVSWFAYWGQGTLVTVSAGGSLDPKSSDKTHTCPPCPAPELLGGPSVFLFPPKPKDTLMISRTPEVTCVVVDVSHED
PEVKFNWYVDGVEVHNAKTKPREEQYNSTYRVVSVLTVLHQDWLNGKEYKCKVSNKALPAPIEKTISKAKGQPREPQ
VYTLPPSREEMTKNQVSLTCLVKGFYPSDIAVEWESNGQPENNYKTTPPVLDSDGSFFLYSKLTVDKSRWQQGNVFS
CSVMHEALHNHYTQKSLSLSPGK
15003-1204-SP34scFv(LvHv)
Nucleotide sequence
[spacer (SEQ ID NO: 507)][Antibody 15003-1204-SP34scFv(LvHv)without spacer
(SEQ ID NO: 547)]
(SEQ ID NO: 9)
[CAAGGCCAGTCTGGCCAA][GGTTATCGGTGGGGTTGCGAGTGGAATTGCGGTGGGATTACTACTGGCTCGAGCGG
TGGCAGCGGTGGCTCTGGTGGTCTGAGCGGCCGTTCCGATAATCATGGCGGCGGTTCTCAGGCTGTCGTGACACAGG
AAAGCGCCCTGACCACCAGCCCTGGCGAGACAGTGACCCTGACCTGCAGATCTAGCACAGGCGCCGTGACCACAAGC
AACTACGCCAACTGGGTGCAGGAAAAGCCCGACCACCTGTTCACCGGCCTGATCGGCGGCACCAACAAAAGGGCTCC
AGGCGTGCCAGCCAGATTCAGCGGCAGCCTGATTGGCGATAAGGCCGCCCTGACAATCACTGGCGCCCAGACCGAGG
ACGAGGCCATCTACTTTTGCGCCCTGTGGTACAGCAACCTGTGGGTGTTCGGCGGAGGCACCAAGCTGACAGTGCTG
GGAGGCGGAGGATCTGGCGGAGGCGGAAGTGGCGGAGGGGGATCTGAAGTGCAGCTGGTGGAATCTGGCGGCGGACT
GGTGCAGCCTAAGGGCTCTCTGAAGCTGAGCTGTGCCGCCAGCGGCTTCACCTTCAACACCTACGCCATGAATTGGG
TGCGCCAGGCCCCTGGCAAGGGACTGGAATGGGTGGCCCGGATCAGAAGCAAGTACAACAATTACGCCACCTACTAC
GCCGACAGCGTGAAGGACCGGTTCACCATCAGCCGGGACGACAGCCAGAGCATCCTGTATCTGCAGATGAACAACCT
GAAAACCGAGGACACCGCCATGTACTACTGCGTGCGGCACGGCAACTTCGGCAACAGCTATGTGTCTTGGTTTGCCT
ACTGGGGCCAGGGCACCCTCGTGACAGTGTCTGCT]
Amino Acid sequence
[spacer (SEQ ID NO: 87)][Antibody 15003-1204-SP34scFv(LvHv)without spacer
(SEQ ID NO: 548)]
(SEQ ID NO: 10)
[QGQSGQ][GYRWGCEWNCGGITTGSSGGSGGSGGLSGRSDNHGGGSQAVVTQESALTTSPGETVTLTCRSSTGAVT
TSNYANWVQEKPDHLFTGLIGGTNKRAPGVPARFSGSLIGDKAALTITGAQTEDEAIYFCALWYSNLWVFGGGTKLT
VLGGGGSGGGGSGGGGSEVQLVESGGGLVQPKGSLKLSCAASGFTFNTYAMNWVRQAPGKGLEWVARIRSKYNNYAT
YYADSVKDRFTISRDDSQSILYLQMNNLKTEDTAMYYCVRHGNFGNSYVSWFAYWGQGTLVTVSA]
Activatab le antibody 15003-1204-SP34scFv(LvHv)-Fc fusion
Nucleotide sequence
[spacer (SEQ ID NO: 507)][Activatable Antibody 15003-1204-SP34scFv(LvHv)-Fc
fusion without spacer (SEQ ID NO: 549)]
(SEQ ID NO: 11)
[CAAGGCCAGTCTGGCCAA][GGTTATCGGTGGGGTTGCGAGTGGAATTGCGGTGGGATTACTACTGGCTCGAGCGG
TGGCAGCGGTGGCTCTGGTGGTCTGAGCGGCCGTTCCGATAATCATGGCGGCGGTTCTCAGGCTGTCGTGACACAGG
AAAGCGCCCTGACCACCAGCCCTGGCGAGACAGTGACCCTGACCTGCAGATCTAGCACAGGCGCCGTGACCACAAGC
AACTACGCCAACTGGGTGCAGGAAAAGCCCGACCACCTGTTCACCGGCCTGATCGGCGGCACCAACAAAAGGGCTCC
AGGCGTGCCAGCCAGATTCAGCGGCAGCCTGATTGGCGATAAGGCCGCCCTGACAATCACTGGCGCCCAGACCGAGG
ACGAGGCCATCTACTTTTGCGCCCTGTGGTACAGCAACCTGTGGGTGTTCGGCGGAGGCACCAAGCTGACAGTGCTG
GGAGGCGGAGGATCTGGCGGAGGCGGAAGTGGCGGAGGGGGATCTGAAGTGCAGCTGGTGGAATCTGGCGGCGGACT
GGTGCAGCCTAAGGGCTCTCTGAAGCTGAGCTGTGCCGCCAGCGGCTTCACCTTCAACACCTACGCCATGAATTGGG
TGCGCCAGGCCCCTGGCAAGGGACTGGAATGGGTGGCCCGGATCAGAAGCAAGTACAACAATTACGCCACCTACTAC
GCCGACAGCGTGAAGGACCGGTTCACCATCAGCCGGGACGACAGCCAGAGCATCCTGTATCTGCAGATGAACAACCT
GAAAACCGAGGACACCGCCATGTACTACTGCGTGCGGCACGGCAACTTCGGCAACAGCTATGTGTCTTGGTTTGCCT
ACTGGGGCCAGGGCACCCTCGTGACAGTGTCTGCTGGCGGCTCCCTGGACCCTAAGTCATCTGACAAAACTCACACA
TGCCCACCGTGCCCAGCACCTGAACTCCTGGGGGGACCGTCAGTCTTCCTCTTCCCCCCAAAACCCAAGGACACCCT
CATGATCTCCCGGACCCCTGAGGTCACATGCGTGGTGGTGGACGTGAGCCACGAAGACCCTGAGGTCAAGTTCAACT
GGTACGTGGACGGCGTGGAGGTGCATAATGCCAAGACAAAGCCGCGGGAGGAGCAGTACAACAGCACGTACCGTGTG
GTCAGCGTCCTCACCGTCCTGCACCAGGACTGGCTGAATGGCAAGGAGTACAAGTGCAAGGTCTCCAACAAAGCCCT
CCCAGCCCCCATCGAGAAAACCATCTCCAAAGCCAAAGGGCAGCCCCGAGAACCACAGGTGTACACCCTGCCCCCAT
CCCGGGAGGAGATGACCAAGAACCAGGTCAGCCTGACCTGCCTGGTCAAAGGCTTCTATCCCAGCGACATCGCCGTG
GAGTGGGAGAGCAATGGGCAGCCGGAGAACAACTACAAGACCACGCCTCCCGTGCTGGACTCCGACGGCTCCTTCTT
CCTCTACAGCAAGCTCACCGTGGACAAGAGCAGGTGGCAGCAGGGGAACGTCTTCTCATGCTCCGTGATGCATGAGG
CTCTGCACAACCACTACACGCAGAAGAGCCTCTCCCTGTCTCCGGGTAAA]
Amino Acid Sequence
[spacer (SEQ ID NO: 407)][Activatable Antibody 15003-1204-SP34scFv(LvHv)-Fc
fusion without spacer (SEQ ID NO: 550)]
(SEQ ID NO: 12)
[QGQSGQ][GYRWGCEWNCGGITTGSSGGSGGSGGLSGRSDNHGGGSQAVVTQESALTTSPGETVTLTCRSSTGAVT
TSNYANWVQEKPDHLFTGLIGGTNKRAPGVPARFSGSLIGDKAALTITGAQTEDEAIYFCALWYSNLWVFGGGTKLT
VLGGGGSGGGGSGGGGSEVQLVESGGGLVQPKGSLKLSCAASGFTFNTYAMNWVRQAPGKGLEWVARIRSKYNNYAT
YYADSVKDRFTISRDDSQSILYLQMNNLKTEDTAMYYCVRHGNFGNSYVSWFAYWGQGTLVTVSAGGSLDPKSSDKT
HTCPPCPAPELLGGPSVFLFPPKPKDTLMISRTPEVTCVVVDVSHEDPEVKFNWYVDGVEVHNAKTKPREEQYNSTY
RVVSVLTVLHQDWLNGKEYKCKVSNKALPAPIEKTISKAKGQPREPQVYTLPPSREEMTKNQVSLTCLVKGFYPSDI
AVEWESNGQPENNYKTTPPVLDSDGSFFLYSKLTVDKSRWQQGNVFSCSVMHEALHNHYTQKSLSLSPGK]
15263-1204-SP34scFv(LvHv)
Nucleotide sequence
[spacer (SEQ ID NO: 507)][15263-1204-SP34scFv(LvHv) without spacer
(SEQ ID NO: 551)]
(SEQ ID NO: 13)
[CAAGGCCAGTCTGGCCAA][TGGTATTCGGGTGGGTGCGAGGCTTTTTGCGGTATTTTGTCGTCGGGCTCGAGCGG
TGGCAGCGGTGGCTCTGGTGGTCTGAGCGGCCGTTCCGATAATCATGGCGGCGGTTCTCAGGCTGTCGTGACACAGG
AAAGCGCCCTGACCACCAGCCCTGGCGAGACAGTGACCCTGACCTGCAGATCTAGCACAGGCGCCGTGACCACAAGC
AACTACGCCAACTGGGTGCAGGAAAAGCCCGACCACCTGTTCACCGGCCTGATCGGCGGCACCAACAAAAGGGCTCC
AGGCGTGCCAGCCAGATTCAGCGGCAGCCTGATTGGCGATAAGGCCGCCCTGACAATCACTGGCGCCCAGACCGAGG
ACGAGGCCATCTACTTTTGCGCCCTGTGGTACAGCAACCTGTGGGTGTTCGGCGGAGGCACCAAGCTGACAGTGCTG
GGAGGCGGAGGATCTGGCGGAGGCGGAAGTGGCGGAGGGGGATCTGAAGTGCAGCTGGTGGAATCTGGCGGCGGACT
GGTGCAGCCTAAGGGCTCTCTGAAGCTGAGCTGTGCCGCCAGCGGCTTCACCTTCAACACCTACGCCATGAATTGGG
TGCGCCAGGCCCCTGGCAAGGGACTGGAATGGGTGGCCCGGATCAGAAGCAAGTACAACAATTACGCCACCTACTAC
GCCGACAGCGTGAAGGACCGGTTCACCATCAGCCGGGACGACAGCCAGAGCATCCTGTATCTGCAGATGAACAACCT
GAAAACCGAGGACACCGCCATGTACTACTGCGTGCGGCACGGCAACTTCGGCAACAGCTATGTGTCTTGGTTTGCCT
ACTGGGGCCAGGGCACCCTCGTGACAGTGTCTGCT]
Amino Acid sequence
[spacer (SEQ ID NO: 87)][15263-1204-SP34scFv(LvHv)without spacer
(SEQ ID NO: 552)]
(SEQ ID NO: 14)
[QGQSGQ][WYSGGCEAFCGILSSGSSGGSGGSGGLSGRSDNHGGGSQAVVTQESALTTSPGETVTLTCRSSTGAVT
TSNYANWVQEKPDHLFTGLIGGTNKRAPGVPARFSGSLIGDKAALTITGAQTEDEAIYFCALWYSNLWVFGGGTKLT
VLGGGGSGGGGSGGGGSEVQLVESGGGLVQPKGSLKLSCAASGFTFNTYAMNWVRQAPGKGLEWVARIRSKYNNYAT
YYADSVKDRFTISRDDSQSILYLQMNNLKTEDTAMYYCVRHGNFGNSYVSWFAYWGQGTLVTVSA]
Activatableantibody15263-1204-SP34scFv(LyHy)-Fcfusion
Nucleotide sequence
[spacer (SEQ ID NO: 507)][Activatable antibody 15263-1204-SP34scFv(LvHv)-Fc
fusion without spacer (SEQ ID NO: 553)]
(SEQ ID NO: 15)
[CAAGGCCAGTCTGGCCAA][TGGTATTCGGGTGGGTGCGAGGCTTTTTGCGGTATTTTGTCGTCGGGCTCGAGCGG
TGGCAGCGGTGGCTCTGGTGGTCTGAGCGGCCGTTCCGATAATCATGGCGGCGGTTCTCAGGCTGTCGTGACACAGG
AAAGCGCCCTGACCACCAGCCCTGGCGAGACAGTGACCCTGACCTGCAGATCTAGCACAGGCGCCGTGACCACAAGC
AACTACGCCAACTGGGTGCAGGAAAAGCCCGACCACCTGTTCACCGGCCTGATCGGCGGCACCAACAAAAGGGCTCC
AGGCGTGCCAGCCAGATTCAGCGGCAGCCTGATTGGCGATAAGGCCGCCCTGACAATCACTGGCGCCCAGACCGAGG
ACGAGGCCATCTACTTTTGCGCCCTGTGGTACAGCAACCTGTGGGTGTTCGGCGGAGGCACCAAGCTGACAGTGCTG
GGAGGCGGAGGATCTGGCGGAGGCGGAAGTGGCGGAGGGGGATCTGAAGTGCAGCTGGTGGAATCTGGCGGCGGACT
GGTGCAGCCTAAGGGCTCTCTGAAGCTGAGCTGTGCCGCCAGCGGCTTCACCTTCAACACCTACGCCATGAATTGGG
TGCGCCAGGCCCCTGGCAAGGGACTGGAATGGGTGGCCCGGATCAGAAGCAAGTACAACAATTACGCCACCTACTAC
GCCGACAGCGTGAAGGACCGGTTCACCATCAGCCGGGACGACAGCCAGAGCATCCTGTATCTGCAGATGAACAACCT
GAAAACCGAGGACACCGCCATGTACTACTGCGTGCGGCACGGCAACTTCGGCAACAGCTATGTGTCTTGGTTTGCCT
ACTGGGGCCAGGGCACCCTCGTGACAGTGTCTGCTGGCGGCTCCCTGGACCCTAAGTCATCTGACAAAACTCACACA
TGCCCACCGTGCCCAGCACCTGAACTCCTGGGGGGACCGTCAGTCTTCCTCTTCCCCCCAAAACCCAAGGACACCCT
CATGATCTCCCGGACCCCTGAGGTCACATGCGTGGTGGTGGACGTGAGCCACGAAGACCCTGAGGTCAAGTTCAACT
GGTACGTGGACGGCGTGGAGGTGCATAATGCCAAGACAAAGCCGCGGGAGGAGCAGTACAACAGCACGTACCGTGTG
GTCAGCGTCCTCACCGTCCTGCACCAGGACTGGCTGAATGGCAAGGAGTACAAGTGCAAGGTCTCCAACAAAGCCCT
CCCAGCCCCCATCGAGAAAACCATCTCCAAAGCCAAAGGGCAGCCCCGAGAACCACAGGTGTACACCCTGCCCCCAT
CCCGGGAGGAGATGACCAAGAACCAGGTCAGCCTGACCTGCCTGGTCAAAGGCTTCTATCCCAGCGACATCGCCGTG
GAGTGGGAGAGCAATGGGCAGCCGGAGAACAACTACAAGACCACGCCTCCCGTGCTGGACTCCGACGGCTCCTTCTT
CCTCTACAGCAAGCTCACCGTGGACAAGAGCAGGTGGCAGCAGGGGAACGTCTTCTCATGCTCCGTGATGCATGAGG
CTCTGCACAACCACTACACGCAGAAGAGCCTCTCCCTGTCTCCGGGTAAA]
Amino acid sequence
[spacer (SEQ ID NO: 87)][Activatable antibody 15263-1204-SP34scFv(LvHv)-Fc
fusion without spacer (SEQ ID NO: 554)]]
(SEQ ID NO: 16)
[QGQSGQ][WYSGGCEAFCGILSSGSSGGSGGSGGLSGRSDNHGGGSQAVVTQESALTTSPGETVTLTCRSSTGAVT
TSNYANWVQEKPDHLFTGLIGGTNKRAPGVPARFSGSLIGDKAALTITGAQTEDEAIYFCALWYSNLWVFGGGTKLT
VLGGGGSGGGGSGGGGSEVQLVESGGGLVQPKGSLKLSCAASGFTFNTYAMNWVRQAPGKGLEWVARIRSKYNNYAT
YYADSVKDRFTISRDDSQSILYLQMNNLKTEDTAMYYCVRHGNFGNSYVSWFAYWGQGTLVTVSAGGSLDPKSSDKT
HTCPPCPAPELLGGPSVFLFPPKPKDTLMISRTPEVTCVVVDVSHEDPEVKFNWYVDGVEVHNAKTKPREEQYNSTY
RVVSVLTVLHQDWLNGKEYKCKVSNKALPAPIEKTISKAKGQPREPQVYTLPPSREEMTKNQVSLTCLVKGFYPSDI
AVEWESNGQPENNYKTTPPVLDSDGSFFLYSKLTVDKSRWQQGNVFSCSVMHEALHNHYTQKSLSLSPGK]
15860-1204-SP34scFv(LvHv)
Nucleotide sequence
[spacer (SEQ ID NO: 507)][15860-1204-SP34scFv(LvHv) without spacer
(SEQ ID NO: 555)]
(SEQ ID NO: 17)
[CAAGGCCAGTCTGGCCAA][GTTTATTATTGCGGTGGGAATGAGAGTCTGTGCGGTGAGAGGAGGGGCTCGAGCGG
TGGCAGCGGTGGCTCTGGTGGTCTGAGCGGCCGTTCCGATAATCATGGCGGCGGTTCTCAGGCTGTCGTGACACAGG
AAAGCGCCCTGACCACCAGCCCTGGCGAGACAGTGACCCTGACCTGCAGATCTAGCACAGGCGCCGTGACCACAAGC
AACTACGCCAACTGGGTGCAGGAAAAGCCCGACCACCTGTTCACCGGCCTGATCGGCGGCACCAACAAAAGGGCTCC
AGGCGTGCCAGCCAGATTCAGCGGCAGCCTGATTGGCGATAAGGCCGCCCTGACAATCACTGGCGCCCAGACCGAGG
ACGAGGCCATCTACTTTTGCGCCCTGTGGTACAGCAACCTGTGGGTGTTCGGCGGAGGCACCAAGCTGACAGTGCTG
GGAGGCGGAGGATCTGGCGGAGGCGGAAGTGGCGGAGGGGGATCTGAAGTGCAGCTGGTGGAATCTGGCGGCGGACT
GGTGCAGCCTAAGGGCTCTCTGAAGCTGAGCTGTGCCGCCAGCGGCTTCACCTTCAACACCTACGCCATGAATTGGG
TGCGCCAGGCCCCTGGCAAGGGACTGGAATGGGTGGCCCGGATCAGAAGCAAGTACAACAATTACGCCACCTACTAC
GCCGACAGCGTGAAGGACCGGTTCACCATCAGCCGGGACGACAGCCAGAGCATCCTGTATCTGCAGATGAACAACCT
GAAAACCGAGGACACCGCCATGTACTACTGCGTGCGGCACGGCAACTTCGGCAACAGCTATGTGTCTTGGTTTGCCT
ACTGGGGCCAGGGCACCCTCGTGACAGTGTCTGCT]
Amino Acid sequence
[spacer (SEQ ID NO: 87)][15263-1204-SP34scFv(LvHv)without spacer
(SEQ ID NO: 556)]
(SEQ ID NO: 18)
[QGQSGQ][VYYCGGNESLCGERRGSSGGSGGSGGLSGRSDNHGGGSQAVVTQESALTTSPGETVTLTCRSSTGAVT
TSNYANWVQEKPDHLFTGLIGGTNKRAPGVPARFSGSLIGDKAALTITGAQTEDEAIYFCALWYSNLWVFGGGTKLT
VLGGGGSGGGGSGGGGSEVQLVESGGGLVQPKGSLKLSCAASGFTFNTYAMNWVRQAPGKGLEWVARIRSKYNNYAT
YYADSVKDRFTISRDDSQSILYLQMNNLKTEDTAMYYCVRHGNFGNSYVSWFAYWGQGTLVTVSA]
Activatable antibody 15860-1204-SP34scFv(LvHv)-Fc fusion
Nucleotide sequence
[spacer (SEQ ID NO: 507)][Activatable antibody 15860-1204-SP34scFv(LvHv)-Fc
fusion without spacer (SEQ ID NO: 557)]
(SEQ ID NO: 19)
[CAAGGCCAGTCTGGCCAA][GTTTATTATTGCGGTGGGAATGAGAGTCTGTGCGGTGAGAGGAGGGGCTCGAGCGG
TGGCAGCGGTGGCTCTGGTGGTCTGAGCGGCCGTTCCGATAATCATGGCGGCGGTTCTCAGGCTGTCGTGACACAGG
AAAGCGCCCTGACCACCAGCCCTGGCGAGACAGTGACCCTGACCTGCAGATCTAGCACAGGCGCCGTGACCACAAGC
AACTACGCCAACTGGGTGCAGGAAAAGCCCGACCACCTGTTCACCGGCCTGATCGGCGGCACCAACAAAAGGGCTCC
AGGCGTGCCAGCCAGATTCAGCGGCAGCCTGATTGGCGATAAGGCCGCCCTGACAATCACTGGCGCCCAGACCGAGG
ACGAGGCCATCTACTTTTGCGCCCTGTGGTACAGCAACCTGTGGGTGTTCGGCGGAGGCACCAAGCTGACAGTGCTG
GGAGGCGGAGGATCTGGCGGAGGCGGAAGTGGCGGAGGGGGATCTGAAGTGCAGCTGGTGGAATCTGGCGGCGGACT
GGTGCAGCCTAAGGGCTCTCTGAAGCTGAGCTGTGCCGCCAGCGGCTTCACCTTCAACACCTACGCCATGAATTGGG
TGCGCCAGGCCCCTGGCAAGGGACTGGAATGGGTGGCCCGGATCAGAAGCAAGTACAACAATTACGCCACCTACTAC
GCCGACAGCGTGAAGGACCGGTTCACCATCAGCCGGGACGACAGCCAGAGCATCCTGTATCTGCAGATGAACAACCT
GAAAACCGAGGACACCGCCATGTACTACTGCGTGCGGCACGGCAACTTCGGCAACAGCTATGTGTCTTGGTTTGCCT
ACTGGGGCCAGGGCACCCTCGTGACAGTGTCTGCTGGCGGCTCCCTGGACCCTAAGTCATCTGACAAAACTCACACA
TGCCCACCGTGCCCAGCACCTGAACTCCTGGGGGGACCGTCAGTCTTCCTCTTCCCCCCAAAACCCAAGGACACCCT
CATGATCTCCCGGACCCCTGAGGTCACATGCGTGGTGGTGGACGTGAGCCACGAAGACCCTGAGGTCAAGTTCAACT
GGTACGTGGACGGCGTGGAGGTGCATAATGCCAAGACAAAGCCGCGGGAGGAGCAGTACAACAGCACGTACCGTGTG
GTCAGCGTCCTCACCGTCCTGCACCAGGACTGGCTGAATGGCAAGGAGTACAAGTGCAAGGTCTCCAACAAAGCCCT
CCCAGCCCCCATCGAGAAAACCATCTCCAAAGCCAAAGGGCAGCCCCGAGAACCACAGGTGTACACCCTGCCCCCAT
CCCGGGAGGAGATGACCAAGAACCAGGTCAGCCTGACCTGCCTGGTCAAAGGCTTCTATCCCAGCGACATCGCCGTG
GAGTGGGAGAGCAATGGGCAGCCGGAGAACAACTACAAGACCACGCCTCCCGTGCTGGACTCCGACGGCTCCTTCTT
CCTCTACAGCAAGCTCACCGTGGACAAGAGCAGGTGGCAGCAGGGGAACGTCTTCTCATGCTCCGTGATGCATGAGG
CTCTGCACAACCACTACACGCAGAAGAGCCTCTCCCTGTCTCCGGGTAAA]
Amino Acid sequence
[spacer (SEQ ID NO: 87)][Activatable antibody 15860-1204-SP34scFv(LvHv)-Fc
fusion without spacer (SEQ ID NO: 558)]
(SEQ ID NO: 20)
[QGQSGQ][VYYCGGNESLCGERRGSSGGSGGSGGLSGRSDNHGGGSQAVVTQESALTTSPGETVTLTCRSSTGAVT
TSNYANWVQEKPDHLFTGLIGGTNKRAPGVPARFSGSLIGDKAALTITGAQTEDEAIYFCALWYSNLWVFGGGTKLT
VLGGGGSGGGGSGGGGSEVQLVESGGGLVQPKGSLKLSCAASGFTFNTYAMNWVRQAPGKGLEWVARIRSKYNNYAT
YYADSVKDRFTISRDDSQSILYLQMNNLKTEDTAMYYCVRHGNFGNSYVSWFAYWGQGTLVTVSAGGSLDPKSSDKT
HTCPPCPAPELLGGPSVFLFPPKPKDTLMISRTPEVTCVVVDVSHEDPEVKFNWYVDGVEVHNAKTKPREEQYNSTY
RVVSVLTVLHQDWLNGKEYKCKVSNKALPAPIEKTISKAKGQPREPQVYTLPPSREEMTKNQVSLTCLVKGFYPSDI
AVEWESNGQPENNYKTTPPVLDSDGSFFLYSKLTVDKSRWQQGNVFSCSVMHEALHNHYTQKSLSLSPGK]
15864-1204-SP34scFv(LvHv)
Nucleotide sequence
[spacer (SEQ ID NO: 507)][15864-1204-SP34scFv(LvHv) without spacer (SEQ ID
NO: 559)]
(SEQ ID NO: 21)
[CAAGGCCAGTCTGGCCAA][TTTATGTGCCAGCAGCGGATGTGGGGGAATGAGTTTTGCCATCAGGGCTCGAGCGG
TGGCAGCGGTGGCTCTGGTGGTCTGAGCGGCCGTTCCGATAATCATGGCGGCGGTTCTCAGGCTGTCGTGACACAGG
AAAGCGCCCTGACCACCAGCCCTGGCGAGACAGTGACCCTGACCTGCAGATCTAGCACAGGCGCCGTGACCACAAGC
AACTACGCCAACTGGGTGCAGGAAAAGCCCGACCACCTGTTCACCGGCCTGATCGGCGGCACCAACAAAAGGGCTCC
AGGCGTGCCAGCCAGATTCAGCGGCAGCCTGATTGGCGATAAGGCCGCCCTGACAATCACTGGCGCCCAGACCGAGG
ACGAGGCCATCTACTTTTGCGCCCTGTGGTACAGCAACCTGTGGGTGTTCGGCGGAGGCACCAAGCTGACAGTGCTG
GGAGGCGGAGGATCTGGCGGAGGCGGAAGTGGCGGAGGGGGATCTGAAGTGCAGCTGGTGGAATCTGGCGGCGGACT
GGTGCAGCCTAAGGGCTCTCTGAAGCTGAGCTGTGCCGCCAGCGGCTTCACCTTCAACACCTACGCCATGAATTGGG
TGCGCCAGGCCCCTGGCAAGGGACTGGAATGGGTGGCCCGGATCAGAAGCAAGTACAACAATTACGCCACCTACTAC
GCCGACAGCGTGAAGGACCGGTTCACCATCAGCCGGGACGACAGCCAGAGCATCCTGTATCTGCAGATGAACAACCT
GAAAACCGAGGACACCGCCATGTACTACTGCGTGCGGCACGGCAACTTCGGCAACAGCTATGTGTCTTGGTTTGCCT
ACTGGGGCCAGGGCACCCTCGTGACAGTGTCTGCT]
Amino Acid
[spacer (SEQ ID NO: 87)][15864-1204-SP34scFv(LvHv) without spacer (SEQ ID
NO: 560)]
(SEQ ID NO: 22)
[QGQSGQ][FMCQQRMWGNEFCHQGSSGGSGGSGGLSGRSDNHGGGSQAVVTQESALTTSPGETVTLTCRSSTGAVT
TSNYANWVQEKPDHLFTGLIGGTNKRAPGVPARFSGSLIGDKAALTITGAQTEDEAIYFCALWYSNLWVFGGGTKLT
VLGGGGSGGGGSGGGGSEVQLVESGGGLVQPKGSLKLSCAASGFTFNTYAMNWVRQAPGKGLEWVARIRSKYNNYAT
YYADSVKDRFTISRDDSQSILYLQMNNLKTEDTAMYYCVRHGNFGNSYVSWFAYWGQGTLVTVSA]
Activatab le antibody 15864-1204-SP34scFv(Lvtiv)-Fc fusion
Nucleotide sequence
[spacer (SEQ ID NO: 507)][Activatable antibody 15864-1204-SP34scFv(LvHv)-Fc
fusion without spacer (SEQ ID NO: 561)]
(SEQ ID NO: 23)
[CAAGGCCAGTCTGGCCAA][TTTATGTGCCAGCAGCGGATGTGGGGGAATGAGTTTTGCCATCAGGGCTCGAGCGG
TGGCAGCGGTGGCTCTGGTGGTCTGAGCGGCCGTTCCGATAATCATGGCGGCGGTTCTCAGGCTGTCGTGACACAGG
AAAGCGCCCTGACCACCAGCCCTGGCGAGACAGTGACCCTGACCTGCAGATCTAGCACAGGCGCCGTGACCACAAGC
AACTACGCCAACTGGGTGCAGGAAAAGCCCGACCACCTGTTCACCGGCCTGATCGGCGGCACCAACAAAAGGGCTCC
AGGCGTGCCAGCCAGATTCAGCGGCAGCCTGATTGGCGATAAGGCCGCCCTGACAATCACTGGCGCCCAGACCGAGG
ACGAGGCCATCTACTTTTGCGCCCTGTGGTACAGCAACCTGTGGGTGTTCGGCGGAGGCACCAAGCTGACAGTGCTG
GGAGGCGGAGGATCTGGCGGAGGCGGAAGTGGCGGAGGGGGATCTGAAGTGCAGCTGGTGGAATCTGGCGGCGGACT
GGTGCAGCCTAAGGGCTCTCTGAAGCTGAGCTGTGCCGCCAGCGGCTTCACCTTCAACACCTACGCCATGAATTGGG
TGCGCCAGGCCCCTGGCAAGGGACTGGAATGGGTGGCCCGGATCAGAAGCAAGTACAACAATTACGCCACCTACTAC
GCCGACAGCGTGAAGGACCGGTTCACCATCAGCCGGGACGACAGCCAGAGCATCCTGTATCTGCAGATGAACAACCT
GAAAACCGAGGACACCGCCATGTACTACTGCGTGCGGCACGGCAACTTCGGCAACAGCTATGTGTCTTGGTTTGCCT
ACTGGGGCCAGGGCACCCTCGTGACAGTGTCTGCTGGCGGCTCCCTGGACCCTAAGTCATCTGACAAAACTCACACA
TGCCCACCGTGCCCAGCACCTGAACTCCTGGGGGGACCGTCAGTCTTCCTCTTCCCCCCAAAACCCAAGGACACCCT
CATGATCTCCCGGACCCCTGAGGTCACATGCGTGGTGGTGGACGTGAGCCACGAAGACCCTGAGGTCAAGTTCAACT
GGTACGTGGACGGCGTGGAGGTGCATAATGCCAAGACAAAGCCGCGGGAGGAGCAGTACAACAGCACGTACCGTGTG
GTCAGCGTCCTCACCGTCCTGCACCAGGACTGGCTGAATGGCAAGGAGTACAAGTGCAAGGTCTCCAACAAAGCCCT
CCCAGCCCCCATCGAGAAAACCATCTCCAAAGCCAAAGGGCAGCCCCGAGAACCACAGGTGTACACCCTGCCCCCAT
CCCGGGAGGAGATGACCAAGAACCAGGTCAGCCTGACCTGCCTGGTCAAAGGCTTCTATCCCAGCGACATCGCCGTG
GAGTGGGAGAGCAATGGGCAGCCGGAGAACAACTACAAGACCACGCCTCCCGTGCTGGACTCCGACGGCTCCTTCTT
CCTCTACAGCAAGCTCACCGTGGACAAGAGCAGGTGGCAGCAGGGGAACGTCTTCTCATGCTCCGTGATGCATGAGG
CTCTGCACAACCACTACACGCAGAAGAGCCTCTCCCTGTCTCCGGGTAAA]
Amino acid sequence
[spacer (SEQ ID NO: 87)][Activatable antibody 15864-1204-SP34scFv(LvHv)-Fc
fusion without spacer (SEQ ID NO: 562)]
(SEQ ID NO: 24)
[QGQSGQ][FMCQQRMWGNEFCHQGSSGGSGGSGGLSGRSDNHGGGSQAVVTQESALTTSPGETVTLTCRSSTGAVT
TSNYANWVQEKPDHLFTGLIGGTNKRAPGVPARFSGSLIGDKAALTITGAQTEDEAIYFCALWYSNLWVFGGGTKLT
VLGGGGSGGGGSGGGGSEVQLVESGGGLVQPKGSLKLSCAASGFTFNTYAMNWVRQAPGKGLEWVARIRSKYNNYAT
YYADSVKDRFTISRDDSQSILYLQMNNLKTEDTAMYYCVRHGNFGNSYVSWFAYWGQGTLVTVSAGGSLDPKSSDKT
HTCPPCPAPELLGGPSVFLFPPKPKDTLMISRTPEVTCVVVDVSHEDPEVKFNWYVDGVEVHNAKTKPREEQYNSTY
RVVSVLTVLHQDWLNGKEYKCKVSNKALPAPIEKTISKAKGQPREPQVYTLPPSREEMTKNQVSLTCLVKGFYPSDI
AVEWESNGQPENNYKTTPPVLDSDGSFFLYSKLTVDKSRWQQGNVFSCSVMHEALHNHYTQKSLSLSPGK]
15865-1204-SP34scFv(LvHv)
Nucleotide sequence
[spacer (SEQ ID NO: 507)][15865-1204-SP34scFv(LvHv) without spacer (SEQ ID
NO: 563)]
(SEQ ID NO: 25)
[CAAGGCCAGTCTGGCCAA][ATGATGTATTGCGGTGGGAATGAGGTGTTGTGCGGGCCGCGGGTTGGCTCGAGCGG
TGGCAGCGGTGGCTCTGGTGGTCTGAGCGGCCGTTCCGATAATCATGGCGGCGGTTCTCAGGCTGTCGTGACACAGG
AAAGCGCCCTGACCACCAGCCCTGGCGAGACAGTGACCCTGACCTGCAGATCTAGCACAGGCGCCGTGACCACAAGC
AACTACGCCAACTGGGTGCAGGAAAAGCCCGACCACCTGTTCACCGGCCTGATCGGCGGCACCAACAAAAGGGCTCC
AGGCGTGCCAGCCAGATTCAGCGGCAGCCTGATTGGCGATAAGGCCGCCCTGACAATCACTGGCGCCCAGACCGAGG
ACGAGGCCATCTACTTTTGCGCCCTGTGGTACAGCAACCTGTGGGTGTTCGGCGGAGGCACCAAGCTGACAGTGCTG
GGAGGCGGAGGATCTGGCGGAGGCGGAAGTGGCGGAGGGGGATCTGAAGTGCAGCTGGTGGAATCTGGCGGCGGACT
GGTGCAGCCTAAGGGCTCTCTGAAGCTGAGCTGTGCCGCCAGCGGCTTCACCTTCAACACCTACGCCATGAATTGGG
TGCGCCAGGCCCCTGGCAAGGGACTGGAATGGGTGGCCCGGATCAGAAGCAAGTACAACAATTACGCCACCTACTAC
GCCGACAGCGTGAAGGACCGGTTCACCATCAGCCGGGACGACAGCCAGAGCATCCTGTATCTGCAGATGAACAACCT
GAAAACCGAGGACACCGCCATGTACTACTGCGTGCGGCACGGCAACTTCGGCAACAGCTATGTGTCTTGGTTTGCCT
ACTGGGGCCAGGGCACCCTCGTGACAGTGTCTGCT]
Amino Acid sequence
[spacer (SEQ ID NO: 87)][15865-1204-SP34scFv(LvHv) without spacer (SEQ ID
NO: 564)]
(SEQ ID NO: 26)
[QGQSGQ][MMYCGGNEVLCGPRVGSSGGSGGSGGLSGRSDNHGGGSQAVVTQESALTTSPGETVTLTCRSSTGAVT
TSNYANWVQEKPDHLFTGLIGGTNKRAPGVPARFSGSLIGDKAALTITGAQTEDEAIYFCALWYSNLWVFGGGTKLT
VLGGGGSGGGGSGGGGSEVQLVESGGGLVQPKGSLKLSCAASGFTFNTYAMNWVRQAPGKGLEWVARIRSKYNNYAT
YYADSVKDRFTISRDDSQSILYLQMNNLKTEDTAMYYCVRHGNFGNSYVSWFAYWGQGTLVTVSA]
Activatable antibody 15865-1204-SP34scFv(LvHv)-Fc fusion
Nucleotide sequence
[spacer (SEQ ID NO: 507)][Activatable antibody 15865-1204-SP34scFv(LvHv)-Fc
fusion without spacer (SEQ ID NO: 565)]
(SEQ ID NO: 27)
[CAAGGCCAGTCTGGCCAA][ATGATGTATTGCGGTGGGAATGAGGTGTTGTGCGGGCCGCGGGTTGGCTCGAGCGG
TGGCAGCGGTGGCTCTGGTGGTCTGAGCGGCCGTTCCGATAATCATGGCGGCGGTTCTCAGGCTGTCGTGACACAGG
AAAGCGCCCTGACCACCAGCCCTGGCGAGACAGTGACCCTGACCTGCAGATCTAGCACAGGCGCCGTGACCACAAGC
AACTACGCCAACTGGGTGCAGGAAAAGCCCGACCACCTGTTCACCGGCCTGATCGGCGGCACCAACAAAAGGGCTCC
AGGCGTGCCAGCCAGATTCAGCGGCAGCCTGATTGGCGATAAGGCCGCCCTGACAATCACTGGCGCCCAGACCGAGG
ACGAGGCCATCTACTTTTGCGCCCTGTGGTACAGCAACCTGTGGGTGTTCGGCGGAGGCACCAAGCTGACAGTGCTG
GGAGGCGGAGGATCTGGCGGAGGCGGAAGTGGCGGAGGGGGATCTGAAGTGCAGCTGGTGGAATCTGGCGGCGGACT
GGTGCAGCCTAAGGGCTCTCTGAAGCTGAGCTGTGCCGCCAGCGGCTTCACCTTCAACACCTACGCCATGAATTGGG
TGCGCCAGGCCCCTGGCAAGGGACTGGAATGGGTGGCCCGGATCAGAAGCAAGTACAACAATTACGCCACCTACTAC
GCCGACAGCGTGAAGGACCGGTTCACCATCAGCCGGGACGACAGCCAGAGCATCCTGTATCTGCAGATGAACAACCT
GAAAACCGAGGACACCGCCATGTACTACTGCGTGCGGCACGGCAACTTCGGCAACAGCTATGTGTCTTGGTTTGCCT
ACTGGGGCCAGGGCACCCTCGTGACAGTGTCTGCTGGCGGCTCCCTGGACCCTAAGTCATCTGACAAAACTCACACA
TGCCCACCGTGCCCAGCACCTGAACTCCTGGGGGGACCGTCAGTCTTCCTCTTCCCCCCAAAACCCAAGGACACCCT
CATGATCTCCCGGACCCCTGAGGTCACATGCGTGGTGGTGGACGTGAGCCACGAAGACCCTGAGGTCAAGTTCAACT
GGTACGTGGACGGCGTGGAGGTGCATAATGCCAAGACAAAGCCGCGGGAGGAGCAGTACAACAGCACGTACCGTGTG
GTCAGCGTCCTCACCGTCCTGCACCAGGACTGGCTGAATGGCAAGGAGTACAAGTGCAAGGTCTCCAACAAAGCCCT
CCCAGCCCCCATCGAGAAAACCATCTCCAAAGCCAAAGGGCAGCCCCGAGAACCACAGGTGTACACCCTGCCCCCAT
CCCGGGAGGAGATGACCAAGAACCAGGTCAGCCTGACCTGCCTGGTCAAAGGCTTCTATCCCAGCGACATCGCCGTG
GAGTGGGAGAGCAATGGGCAGCCGGAGAACAACTACAAGACCACGCCTCCCGTGCTGGACTCCGACGGCTCCTTCTT
CCTCTACAGCAAGCTCACCGTGGACAAGAGCAGGTGGCAGCAGGGGAACGTCTTCTCATGCTCCGTGATGCATGAGG
CTCTGCACAACCACTACACGCAGAAGAGCCTCTCCCTGTCTCCGGGTAAA]
Amino Acid sequence
[spacer (SEQ ID NO: 87)][Activatable antibody 15865-1204-SP34scFv(LvHv)-Fc
fusion without spacer (SEQ ID NO: 566)]
(SEQ ID NO: 28)
[QGQSGQ][MMYCGGNEVLCGPRVGSSGGSGGSGGLSGRSDNHGGGSQAVVTQESALTTSPGETVTLTCRSSTGAVT
TSNYANWVQEKPDHLFTGLIGGTNKRAPGVPARFSGSLIGDKAALTITGAQTEDEAIYFCALWYSNLWVFGGGTKLT
VLGGGGSGGGGSGGGGSEVQLVESGGGLVQPKGSLKLSCAASGFTFNTYAMNWVRQAPGKGLEWVARIRSKYNNYAT
YYADSVKDRFTISRDDSQSILYLQMNNLKTEDTAMYYCVRHGNFGNSYVSWFAYWGQGTLVTVSAGGSLDPKSSDKT
HTCPPCPAPELLGGPSVFLFPPKPKDTLMISRTPEVTCVVVDVSHEDPEVKFNWYVDGVEVHNAKTKPREEQYNSTY
RVVSVLTVLHQDWLNGKEYKCKVSNKALPAPIEKTISKAKGQPREPQVYTLPPSREEMTKNQVSLTCLVKGFYPSDI
AVEWESNGQPENNYKTTPPVLDSDGSFFLYSKLTVDKSRWQQGNVFSCSVMHEALHNHYTQKSLSLSPGK]
SP34scFv(HvLv)
Nucleotide sequence
(SEQ ID NO: 29)
GAAGTGCAGCTGGTGGAATCTGGGGGCGGACTGGTGCAGCCTAAGGGCAGCCTGAAGCTGAGCTGTGCCGCCAGCGG
CTTCACCTTCAACACCTACGCCATGAACTGGGTGCGCCAGGCCCCTGGCAAAGGCCTGGAATGGGTGGCCCGGATCA
GAAGCAAGTACAACAATTACGCCACCTACTACGCCGACAGCGTGAAGGACAGATTCACCATCAGCCGGGACGACAGC
CAGAGCATCCTGTACCTGCAGATGAACAACCTGAAAACCGAGGACACCGCCATGTACTACTGCGTGCGGCACGGCAA
CTTCGGCAACAGCTATGTGTCTTGGTTTGCCTACTGGGGCCAGGGCACCCTCGTGACAGTGTCTGCCGGTGGTGGTG
GTAGTGGTGGCGGTGGTTCAGGCGGTGGCGGTAGCCAGGCTGTCGTGACACAGGAAAGCGCCCTGACCACCAGCCCT
GGCGAGACAGTGACCCTGACCTGTAGAAGCAGCACAGGCGCCGTGACCACAAGCAACTACGCCAATTGGGTGCAGGA
AAAGCCCGACCACCTGTTCACCGGCCTGATCGGCGGCACCAACAAAAGGGCTCCAGGCGTGCCAGCCAGATTCAGCG
GCTCCCTGATCGGAGATAAGGCCGCCCTGACAATCACTGGCGCCCAGACCGAGGACGAGGCCATCTACTTTTGCGCC
CTGTGGTACAGCAACCTGTGGGTGTTCGGCGGAGGCACCAAGCTGACCGTGCTG
Amino Acid sequence
(SEQ ID NO: 30)
EVQLVESGGGLVQPKGSLKLSCAASGFTFNTYAMNWVRQAPGKGLEWVARIRSKYNNYATYYADSVKDRFTISRDDS
QSILYLQMNNLKTEDTAMYYCVRHGNFGNSYVSWFAYWGQGTLVTVSAGGGGSGGGGSGGGGSQAVVTQESALTTSP
GETVTLTCRSSTGAVTTSNYANWVQEKPDHLFTGLIGGTNKRAPGVPARFSGSLIGDKAALTITGAQTEDEAIYFCA
LWYSNLWVFGGGTKLTVL
Antibody SP34scFv(HvLv)-Fc fusion
Nucleotide sequence
(SEQ ID NO: 31)
GAAGTGCAGCTGGTGGAATCTGGGGGCGGACTGGTGCAGCCTAAGGGCAGCCTGAAGCTGAGCTGTGCCGCCAGCGG
CTTCACCTTCAACACCTACGCCATGAACTGGGTGCGCCAGGCCCCTGGCAAAGGCCTGGAATGGGTGGCCCGGATCA
GAAGCAAGTACAACAATTACGCCACCTACTACGCCGACAGCGTGAAGGACAGATTCACCATCAGCCGGGACGACAGC
CAGAGCATCCTGTACCTGCAGATGAACAACCTGAAAACCGAGGACACCGCCATGTACTACTGCGTGCGGCACGGCAA
CTTCGGCAACAGCTATGTGTCTTGGTTTGCCTACTGGGGCCAGGGCACCCTCGTGACAGTGTCTGCCGGTGGTGGTG
GTAGTGGTGGCGGTGGTTCAGGCGGTGGCGGTAGCCAGGCTGTCGTGACACAGGAAAGCGCCCTGACCACCAGCCCT
GGCGAGACAGTGACCCTGACCTGTAGAAGCAGCACAGGCGCCGTGACCACAAGCAACTACGCCAATTGGGTGCAGGA
AAAGCCCGACCACCTGTTCACCGGCCTGATCGGCGGCACCAACAAAAGGGCTCCAGGCGTGCCAGCCAGATTCAGCG
GCTCCCTGATCGGAGATAAGGCCGCCCTGACAATCACTGGCGCCCAGACCGAGGACGAGGCCATCTACTTTTGCGCC
CTGTGGTACAGCAACCTGTGGGTGTTCGGCGGAGGCACCAAGCTGACCGTGCTGGGCGGCTCCCTGGACCCTAAGTC
ATCTGACAAAACTCACACATGCCCACCGTGCCCAGCACCTGAACTCCTGGGGGGACCGTCAGTCTTCCTCTTCCCCC
CAAAACCCAAGGACACCCTCATGATCTCCCGGACCCCTGAGGTCACATGCGTGGTGGTGGACGTGAGCCACGAAGAC
CCTGAGGTCAAGTTCAACTGGTACGTGGACGGCGTGGAGGTGCATAATGCCAAGACAAAGCCGCGGGAGGAGCAGTA
CAACAGCACGTACCGTGTGGTCAGCGTCCTCACCGTCCTGCACCAGGACTGGCTGAATGGCAAGGAGTACAAGTGCA
AGGTCTCCAACAAAGCCCTCCCAGCCCCCATCGAGAAAACCATCTCCAAAGCCAAAGGGCAGCCCCGAGAACCACAG
GTGTACACCCTGCCCCCATCCCGGGAGGAGATGACCAAGAACCAGGTCAGCCTGACCTGCCTGGTCAAAGGCTTCTA
TCCCAGCGACATCGCCGTGGAGTGGGAGAGCAATGGGCAGCCGGAGAACAACTACAAGACCACGCCTCCCGTGCTGG
ACTCCGACGGCTCCTTCTTCCTCTACAGCAAGCTCACCGTGGACAAGAGCAGGTGGCAGCAGGGGAACGTCTTCTCA
TGCTCCGTGATGCATGAGGCTCTGCACAACCACTACACGCAGAAGAGCCTCTCCCTGTCTCCGGGTAAA
Amino Acid sequence
(SEQ ID NO: 32)
EVQLVESGGGLVQPKGSLKLSCAASGFTFNTYAMNWVRQAPGKGLEWVARIRSKYNNYATYYADSVKDRFTISRDDS
QSILYLQMNNLKTEDTAMYYCVRHGNFGNSYVSWFAYWGQGTLVTVSAGGGGSGGGGSGGGGSQAVVTQESALTTSP
GETVTLTCRSSTGAVTTSNYANWVQEKPDHLFTGLIGGTNKRAPGVPARFSGSLIGDKAALTITGAQTEDEAIYFCA
LWYSNLWVFGGGTKLTVLGGSLDPKSSDKTHTCPPCPAPELLGGPSVFLFPPKPKDTLMISRTPEVTCVVVDVSHED
PEVKFNWYVDGVEVHNAKTKPREEQYNSTYRVVSVLTVLHQDWLNGKEYKCKVSNKALPAPIEKTISKAKGQPREPQ
VYTLPPSREEMTKNQVSLTCLVKGFYPSDIAVEWESNGQPENNYKTTPPVLDSDGSFFLYSKLTVDKSRWQQGNVFS
CSVMHEALHNHYTQKSLSLSPGK
15003-1204-SP34scFv(HvLv)
Nucleotide sequence
[spacer (SEQ ID NO: 507)][15003-1204-SP34scFv(HvLv) without spacer (SEQ ID
NO: 567)]
(SEQ ID NO: 33)
[CAAGGCCAGTCTGGCCAA][GGTTATCGGTGGGGTTGCGAGTGGAATTGCGGTGGGATTACTACTGGCTCGAGCGG
TGGCAGCGGTGGCTCTGGTGGTCTGAGCGGCCGTTCCGATAATCATGGCGGCGGTTCTGAAGTGCAGCTGGTGGAAT
CTGGGGGCGGACTGGTGCAGCCTAAGGGCAGCCTGAAGCTGAGCTGTGCCGCCAGCGGCTTCACCTTCAACACCTAC
GCCATGAACTGGGTGCGCCAGGCCCCTGGCAAAGGCCTGGAATGGGTGGCCCGGATCAGAAGCAAGTACAACAATTA
CGCCACCTACTACGCCGACAGCGTGAAGGACAGATTCACCATCAGCCGGGACGACAGCCAGAGCATCCTGTACCTGC
AGATGAACAACCTGAAAACCGAGGACACCGCCATGTACTACTGCGTGCGGCACGGCAACTTCGGCAACAGCTATGTG
TCTTGGTTTGCCTACTGGGGCCAGGGCACCCTCGTGACAGTGTCTGCCGGTGGTGGTGGTAGTGGTGGCGGTGGTTC
AGGCGGTGGCGGTAGCCAGGCTGTCGTGACACAGGAAAGCGCCCTGACCACCAGCCCTGGCGAGACAGTGACCCTGA
CCTGTAGAAGCAGCACAGGCGCCGTGACCACAAGCAACTACGCCAATTGGGTGCAGGAAAAGCCCGACCACCTGTTC
ACCGGCCTGATCGGCGGCACCAACAAAAGGGCTCCAGGCGTGCCAGCCAGATTCAGCGGCTCCCTGATCGGAGATAA
GGCCGCCCTGACAATCACTGGCGCCCAGACCGAGGACGAGGCCATCTACTTTTGCGCCCTGTGGTACAGCAACCTGT
GGGTGTTCGGCGGAGGCACCAAGCTGACCGTGCTG
Amino Acid sequence
[spacer (SEQ ID NO: 87)][15003-1204-SP34scFv(HvLv)without spacer (SEQ ID
NO: 568)]
(SEQ ID NO: 34)
[QGQSGQ][GYRWGCEWNCGGITTGSSGGSGGSGGLSGRSDNHGGGSEVQLVESGGGLVQPKGSLKLSCAASGFTFN
TYAMNWVRQAPGKGLEWVARIRSKYNNYATYYADSVKDRFTISRDDSQSILYLQMNNLKTEDTAMYYCVRHGNFGNS
YVSWFAYWGQGTLVTVSAGGGGSGGGGSGGGGSQAVVTQESALTTSPGETVTLTCRSSTGAVTTSNYANWVQEKPDH
LFTGLIGGTNKRAPGVPARFSGSLIGDKAALTITGAQTEDEAIYFCALWYSNLWVFGGGTKLTVL]
Activatable antibody 15003-1204-SP34scFv(HvLv)-Fc fusion
Nucleotide sequence
[spacer (SEQ ID NO: 507)][Activatable antibody 15003-1204-SP34scFv(HvLv)-Fc
fusion without spacer (SEQ ID NO: 569)]
(SEQ ID NO: 35)
[CAAGGCCAGTCTGGCCAA][GGTTATCGGTGGGGTTGCGAGTGGAATTGCGGTGGGATTACTACTGGCTCGAGCGG
TGGCAGCGGTGGCTCTGGTGGTCTGAGCGGCCGTTCCGATAATCATGGCGGCGGTTCTGAAGTGCAGCTGGTGGAAT
CTGGGGGCGGACTGGTGCAGCCTAAGGGCAGCCTGAAGCTGAGCTGTGCCGCCAGCGGCTTCACCTTCAACACCTAC
GCCATGAACTGGGTGCGCCAGGCCCCTGGCAAAGGCCTGGAATGGGTGGCCCGGATCAGAAGCAAGTACAACAATTA
CGCCACCTACTACGCCGACAGCGTGAAGGACAGATTCACCATCAGCCGGGACGACAGCCAGAGCATCCTGTACCTGC
AGATGAACAACCTGAAAACCGAGGACACCGCCATGTACTACTGCGTGCGGCACGGCAACTTCGGCAACAGCTATGTG
TCTTGGTTTGCCTACTGGGGCCAGGGCACCCTCGTGACAGTGTCTGCCGGTGGTGGTGGTAGTGGTGGCGGTGGTTC
AGGCGGTGGCGGTAGCCAGGCTGTCGTGACACAGGAAAGCGCCCTGACCACCAGCCCTGGCGAGACAGTGACCCTGA
CCTGTAGAAGCAGCACAGGCGCCGTGACCACAAGCAACTACGCCAATTGGGTGCAGGAAAAGCCCGACCACCTGTTC
ACCGGCCTGATCGGCGGCACCAACAAAAGGGCTCCAGGCGTGCCAGCCAGATTCAGCGGCTCCCTGATCGGAGATAA
GGCCGCCCTGACAATCACTGGCGCCCAGACCGAGGACGAGGCCATCTACTTTTGCGCCCTGTGGTACAGCAACCTGT
GGGTGTTCGGCGGAGGCACCAAGCTGACCGTGCTGGGCGGCTCCCTGGACCCTAAGTCATCTGACAAAACTCACACA
TGCCCACCGTGCCCAGCACCTGAACTCCTGGGGGGACCGTCAGTCTTCCTCTTCCCCCCAAAACCCAAGGACACCCT
CATGATCTCCCGGACCCCTGAGGTCACATGCGTGGTGGTGGACGTGAGCCACGAAGACCCTGAGGTCAAGTTCAACT
GGTACGTGGACGGCGTGGAGGTGCATAATGCCAAGACAAAGCCGCGGGAGGAGCAGTACAACAGCACGTACCGTGTG
GTCAGCGTCCTCACCGTCCTGCACCAGGACTGGCTGAATGGCAAGGAGTACAAGTGCAAGGTCTCCAACAAAGCCCT
CCCAGCCCCCATCGAGAAAACCATCTCCAAAGCCAAAGGGCAGCCCCGAGAACCACAGGTGTACACCCTGCCCCCAT
CCCGGGAGGAGATGACCAAGAACCAGGTCAGCCTGACCTGCCTGGTCAAAGGCTTCTATCCCAGCGACATCGCCGTG
GAGTGGGAGAGCAATGGGCAGCCGGAGAACAACTACAAGACCACGCCTCCCGTGCTGGACTCCGACGGCTCCTTCTT
CCTCTACAGCAAGCTCACCGTGGACAAGAGCAGGTGGCAGCAGGGGAACGTCTTCTCATGCTCCGTGATGCATGAGG
CTCTGCACAACCACTACACGCAGAAGAGCCTCTCCCTGTCTCCGGGTAAA
Amino Acid sequence
[spacer (SEQ ID NO: 87)][Activatable antibody 15003-1204-SP34scFv(HvLv)-Fc
fusion without spacer (SEQ ID NO: 570)]
(SEQ ID NO: 36)
[QGQSGQ][GYRWGCEWNCGGITTGSSGGSGGSGGLSGRSDNHGGGSEVQLVESGGGLVQPKGSLKLSCAASGFTFN
TYAMNWVRQAPGKGLEWVARIRSKYNNYATYYADSVKDRFTISRDDSQSILYLQMNNLKTEDTAMYYCVRHGNFGNS
YVSWFAYWGQGTLVTVSAGGGGSGGGGSGGGGSQAVVTQESALTTSPGETVTLTCRSSTGAVTTSNYANWVQEKPDH
LFTGLIGGTNKRAPGVPARFSGSLIGDKAALTITGAQTEDEAIYFCALWYSNLWVFGGGTKLTVLGGSLDPKSSDKT
HTCPPCPAPELLGGPSVFLFPPKPKDTLMISRTPEVTCVVVDVSHEDPEVKFNWYVDGVEVHNAKTKPREEQYNSTY
RVVSVLTVLHQDWLNGKEYKCKVSNKALPAPIEKTISKAKGQPREPQVYTLPPSREEMTKNQVSLTCLVKGFYPSDI
AVEWESNGQPENNYKTTPPVLDSDGSFFLYSKLTVDKSRWQQGNVFSCSVMHEALHNHYTQKSLSLSPGK]
15263-1204-SP34scFv(HvLv)
Nucleotide sequence
[spacer (SEQ ID NO: 507)][15263-1204-SP34scFv(HvLv) without spacer (SEQ ID
NO: 571)]
(SEQ ID NO: 37)
[CAAGGCCAGTCTGGCCAA][TGGTATTCGGGTGGGTGCGAGGCTTTTTGCGGTATTTTGTCGTCGGGCTCGAGCGG
TGGCAGCGGTGGCTCTGGTGGTCTGAGCGGCCGTTCCGATAATCATGGCGGCGGTTCTGAAGTGCAGCTGGTGGAAT
CTGGGGGCGGACTGGTGCAGCCTAAGGGCAGCCTGAAGCTGAGCTGTGCCGCCAGCGGCTTCACCTTCAACACCTAC
GCCATGAACTGGGTGCGCCAGGCCCCTGGCAAAGGCCTGGAATGGGTGGCCCGGATCAGAAGCAAGTACAACAATTA
CGCCACCTACTACGCCGACAGCGTGAAGGACAGATTCACCATCAGCCGGGACGACAGCCAGAGCATCCTGTACCTGC
AGATGAACAACCTGAAAACCGAGGACACCGCCATGTACTACTGCGTGCGGCACGGCAACTTCGGCAACAGCTATGTG
TCTTGGTTTGCCTACTGGGGCCAGGGCACCCTCGTGACAGTGTCTGCCGGTGGTGGTGGTAGTGGTGGCGGTGGTTC
AGGCGGTGGCGGTAGCCAGGCTGTCGTGACACAGGAAAGCGCCCTGACCACCAGCCCTGGCGAGACAGTGACCCTGA
CCTGTAGAAGCAGCACAGGCGCCGTGACCACAAGCAACTACGCCAATTGGGTGCAGGAAAAGCCCGACCACCTGTTC
ACCGGCCTGATCGGCGGCACCAACAAAAGGGCTCCAGGCGTGCCAGCCAGATTCAGCGGCTCCCTGATCGGAGATAA
GGCCGCCCTGACAATCACTGGCGCCCAGACCGAGGACGAGGCCATCTACTTTTGCGCCCTGTGGTACAGCAACCTGT
GGGTGTTCGGCGGAGGCACCAAGCTGACCGTGCTG]
Amino Acid sequence
[spacer (SEQ ID NO: 87)][15263-1204-SP34scFv(HvLv) without spacer (SEQ ID
NO: 572)]
(SEQ ID NO: 38)
[QGQSGQ][WYSGGCEAFCGILSSGSSGGSGGSGGLSGRSDNHGGGSEVQLVESGGGLVQPKGSLKLSCAASGFTFN
TYAMNWVRQAPGKGLEWVARIRSKYNNYATYYADSVKDRFTISRDDSQSILYLQMNNLKTEDTAMYYCVRHGNFGNS
YVSWFAYWGQGTLVTVSAGGGGSGGGGSGGGGSQAVVTQESALTTSPGETVTLTCRSSTGAVTTSNYANWVQEKPDH
LFTGLIGGTNKRAPGVPARFSGSLIGDKAALTITGAQTEDEAIYFCALWYSNLWVFGGGTKLTVL]
Activatable antibody 15263-1204-SP34scFv(HvLv)-Fc fusion
Nucleotide sequence
[spacer (SEQ ID NO: 507)][Activatable antibody 15263-1204-SP34scFv(HvLv)-Fc
fusion without spacer (SEQ ID NO: 573)]
(SEQ ID NO: 39)
[CAAGGCCAGTCTGGCCAA][TGGTATTCGGGTGGGTGCGAGGCTTTTTGCGGTATTTTGTCGTCGGGCTCGAGCGG
TGGCAGCGGTGGCTCTGGTGGTCTGAGCGGCCGTTCCGATAATCATGGCGGCGGTTCTGAAGTGCAGCTGGTGGAAT
CTGGGGGCGGACTGGTGCAGCCTAAGGGCAGCCTGAAGCTGAGCTGTGCCGCCAGCGGCTTCACCTTCAACACCTAC
GCCATGAACTGGGTGCGCCAGGCCCCTGGCAAAGGCCTGGAATGGGTGGCCCGGATCAGAAGCAAGTACAACAATTA
CGCCACCTACTACGCCGACAGCGTGAAGGACAGATTCACCATCAGCCGGGACGACAGCCAGAGCATCCTGTACCTGC
AGATGAACAACCTGAAAACCGAGGACACCGCCATGTACTACTGCGTGCGGCACGGCAACTTCGGCAACAGCTATGTG
TCTTGGTTTGCCTACTGGGGCCAGGGCACCCTCGTGACAGTGTCTGCCGGTGGTGGTGGTAGTGGTGGCGGTGGTTC
AGGCGGTGGCGGTAGCCAGGCTGTCGTGACACAGGAAAGCGCCCTGACCACCAGCCCTGGCGAGACAGTGACCCTGA
CCTGTAGAAGCAGCACAGGCGCCGTGACCACAAGCAACTACGCCAATTGGGTGCAGGAAAAGCCCGACCACCTGTTC
ACCGGCCTGATCGGCGGCACCAACAAAAGGGCTCCAGGCGTGCCAGCCAGATTCAGCGGCTCCCTGATCGGAGATAA
GGCCGCCCTGACAATCACTGGCGCCCAGACCGAGGACGAGGCCATCTACTTTTGCGCCCTGTGGTACAGCAACCTGT
GGGTGTTCGGCGGAGGCACCAAGCTGACCGTGCTGGGCGGCTCCCTGGACCCTAAGTCATCTGACAAAACTCACACA
TGCCCACCGTGCCCAGCACCTGAACTCCTGGGGGGACCGTCAGTCTTCCTCTTCCCCCCAAAACCCAAGGACACCCT
CATGATCTCCCGGACCCCTGAGGTCACATGCGTGGTGGTGGACGTGAGCCACGAAGACCCTGAGGTCAAGTTCAACT
GGTACGTGGACGGCGTGGAGGTGCATAATGCCAAGACAAAGCCGCGGGAGGAGCAGTACAACAGCACGTACCGTGTG
GTCAGCGTCCTCACCGTCCTGCACCAGGACTGGCTGAATGGCAAGGAGTACAAGTGCAAGGTCTCCAACAAAGCCCT
CCCAGCCCCCATCGAGAAAACCATCTCCAAAGCCAAAGGGCAGCCCCGAGAACCACAGGTGTACACCCTGCCCCCAT
CCCGGGAGGAGATGACCAAGAACCAGGTCAGCCTGACCTGCCTGGTCAAAGGCTTCTATCCCAGCGACATCGCCGTG
GAGTGGGAGAGCAATGGGCAGCCGGAGAACAACTACAAGACCACGCCTCCCGTGCTGGACTCCGACGGCTCCTTCTT
CCTCTACAGCAAGCTCACCGTGGACAAGAGCAGGTGGCAGCAGGGGAACGTCTTCTCATGCTCCGTGATGCATGAGG
CTCTGCACAACCACTACACGCAGAAGAGCCTCTCCCTGTCTCCGGGTAAA]
Amino Acid sequence
[spacer (SEQ ID NO: 87)][Activatable antibody 15263-1204-SP34scFv(HvLv)-Fc
fusion without spacer (SEQ ID NO: 574)]
(SEQ ID NO: 40)
[QGQSGQ][WYSGGCEAFCGILSSGSSGGSGGSGGLSGRSDNHGGGSEVQLVESGGGLVQPKGSLKLSCAASGFTFN
TYAMNWVRQAPGKGLEWVARIRSKYNNYATYYADSVKDRFTISRDDSQSILYLQMNNLKTEDTAMYYCVRHGNFGNS
YVSWFAYWGQGTLVTVSAGGGGSGGGGSGGGGSQAVVTQESALTTSPGETVTLTCRSSTGAVTTSNYANWVQEKPDH
LFTGLIGGTNKRAPGVPARFSGSLIGDKAALTITGAQTEDEAIYFCALWYSNLWVFGGGTKLTVLGGSLDPKSSDKT
HTCPPCPAPELLGGPSVFLFPPKPKDTLMISRTPEVTCVVVDVSHEDPEVKFNWYVDGVEVHNAKTKPREEQYNSTY
RVVSVLTVLHQDWLNGKEYKCKVSNKALPAPIEKTISKAKGQPREPQVYTLPPSREEMTKNQVSLTCLVKGFYPSDI
AVEWESNGQPENNYKTTPPVLDSDGSFFLYSKLTVDKSRWQQGNVFSCSVMHEALHNHYTQKSLSLSPGK]
15860-1204-SP34scFv(HvLv)
Nucleotide sequence
[spacer (SEQ ID NO: 507)][15860-1204-SP34scFv(HvLv) without spacer (SEQ ID
NO: 575)]
(SEQ ID NO: 41)
[CAAGGCCAGTCTGGCCAA][GTTTATTATTGCGGTGGGAATGAGAGTCTGTGCGGTGAGAGGAGGGGCTCGAGCGG
TGGCAGCGGTGGCTCTGGTGGTCTGAGCGGCCGTTCCGATAATCATGGCGGCGGTTCTGAAGTGCAGCTGGTGGAAT
CTGGGGGCGGACTGGTGCAGCCTAAGGGCAGCCTGAAGCTGAGCTGTGCCGCCAGCGGCTTCACCTTCAACACCTAC
GCCATGAACTGGGTGCGCCAGGCCCCTGGCAAAGGCCTGGAATGGGTGGCCCGGATCAGAAGCAAGTACAACAATTA
CGCCACCTACTACGCCGACAGCGTGAAGGACAGATTCACCATCAGCCGGGACGACAGCCAGAGCATCCTGTACCTGC
AGATGAACAACCTGAAAACCGAGGACACCGCCATGTACTACTGCGTGCGGCACGGCAACTTCGGCAACAGCTATGTG
TCTTGGTTTGCCTACTGGGGCCAGGGCACCCTCGTGACAGTGTCTGCCGGTGGTGGTGGTAGTGGTGGCGGTGGTTC
AGGCGGTGGCGGTAGCCAGGCTGTCGTGACACAGGAAAGCGCCCTGACCACCAGCCCTGGCGAGACAGTGACCCTGA
CCTGTAGAAGCAGCACAGGCGCCGTGACCACAAGCAACTACGCCAATTGGGTGCAGGAAAAGCCCGACCACCTGTTC
ACCGGCCTGATCGGCGGCACCAACAAAAGGGCTCCAGGCGTGCCAGCCAGATTCAGCGGCTCCCTGATCGGAGATAA
GGCCGCCCTGACAATCACTGGCGCCCAGACCGAGGACGAGGCCATCTACTTTTGCGCCCTGTGGTACAGCAACCTGT
GGGTGTTCGGCGGAGGCACCAAGCTGACCGTGCTG]
Amino Acid sequence
[spacer (SEQ ID NO: 87)][15860-1204-SP34scFv(HvLv) without spacer (SEQ ID
NO: 576)]
(SEQ ID NO: 42)
[QGQSGQ][VYYCGGNESLCGERRGSSGGSGGSGGLSGRSDNHGGGSEVQLVESGGGLVQPKGSLKLSCAASGFTFN
TYAMNWVRQAPGKGLEWVARIRSKYNNYATYYADSVKDRFTISRDDSQSILYLQMNNLKTEDTAMYYCVRHGNFGNS
YVSWFAYWGQGTLVTVSAGGGGSGGGGSGGGGSQAVVTQESALTTSPGETVTLTCRSSTGAVTTSNYANWVQEKPDH
LFTGLIGGTNKRAPGVPARFSGSLIGDKAALTITGAQTEDEAIYFCALWYSNLWVFGGGTKLTVL]
Activatable antibody 15860-1204-SP34scFv(HvLv)-Fc fusion
Nucleotide sequence
[spacer (SEQ ID NO: 507)][Activatable antibody 15860-1204-SP34scFv(HvLv)-Fc
fusion without spacer (SEQ ID NO: 577)]
(SEQ ID NO: 43)
[CAAGGCCAGTCTGGCCAA][GTTTATTATTGCGGTGGGAATGAGAGTCTGTGCGGTGAGAGGAGGGGCTCGAGCGG
TGGCAGCGGTGGCTCTGGTGGTCTGAGCGGCCGTTCCGATAATCATGGCGGCGGTTCTGAAGTGCAGCTGGTGGAAT
CTGGGGGCGGACTGGTGCAGCCTAAGGGCAGCCTGAAGCTGAGCTGTGCCGCCAGCGGCTTCACCTTCAACACCTAC
GCCATGAACTGGGTGCGCCAGGCCCCTGGCAAAGGCCTGGAATGGGTGGCCCGGATCAGAAGCAAGTACAACAATTA
CGCCACCTACTACGCCGACAGCGTGAAGGACAGATTCACCATCAGCCGGGACGACAGCCAGAGCATCCTGTACCTGC
AGATGAACAACCTGAAAACCGAGGACACCGCCATGTACTACTGCGTGCGGCACGGCAACTTCGGCAACAGCTATGTG
TCTTGGTTTGCCTACTGGGGCCAGGGCACCCTCGTGACAGTGTCTGCCGGTGGTGGTGGTAGTGGTGGCGGTGGTTC
AGGCGGTGGCGGTAGCCAGGCTGTCGTGACACAGGAAAGCGCCCTGACCACCAGCCCTGGCGAGACAGTGACCCTGA
CCTGTAGAAGCAGCACAGGCGCCGTGACCACAAGCAACTACGCCAATTGGGTGCAGGAAAAGCCCGACCACCTGTTC
ACCGGCCTGATCGGCGGCACCAACAAAAGGGCTCCAGGCGTGCCAGCCAGATTCAGCGGCTCCCTGATCGGAGATAA
GGCCGCCCTGACAATCACTGGCGCCCAGACCGAGGACGAGGCCATCTACTTTTGCGCCCTGTGGTACAGCAACCTGT
GGGTGTTCGGCGGAGGCACCAAGCTGACCGTGCTGGGCGGCTCCCTGGACCCTAAGTCATCTGACAAAACTCACACA
TGCCCACCGTGCCCAGCACCTGAACTCCTGGGGGGACCGTCAGTCTTCCTCTTCCCCCCAAAACCCAAGGACACCCT
CATGATCTCCCGGACCCCTGAGGTCACATGCGTGGTGGTGGACGTGAGCCACGAAGACCCTGAGGTCAAGTTCAACT
GGTACGTGGACGGCGTGGAGGTGCATAATGCCAAGACAAAGCCGCGGGAGGAGCAGTACAACAGCACGTACCGTGTG
GTCAGCGTCCTCACCGTCCTGCACCAGGACTGGCTGAATGGCAAGGAGTACAAGTGCAAGGTCTCCAACAAAGCCCT
CCCAGCCCCCATCGAGAAAACCATCTCCAAAGCCAAAGGGCAGCCCCGAGAACCACAGGTGTACACCCTGCCCCCAT
CCCGGGAGGAGATGACCAAGAACCAGGTCAGCCTGACCTGCCTGGTCAAAGGCTTCTATCCCAGCGACATCGCCGTG
GAGTGGGAGAGCAATGGGCAGCCGGAGAACAACTACAAGACCACGCCTCCCGTGCTGGACTCCGACGGCTCCTTCTT
CCTCTACAGCAAGCTCACCGTGGACAAGAGCAGGTGGCAGCAGGGGAACGTCTTCTCATGCTCCGTGATGCATGAGG
CTCTGCACAACCACTACACGCAGAAGAGCCTCTCCCTGTCTCCGGGTAAA]
Amino Acid sequence
[spacer (SEQ ID NO: 87)][Activatable antibody 15860-1204-SP34scFv(HvLv)-Fc
fusion without spacer (SEQ ID NO: 578)]
(SEQ ID NO: 44)
[QGQSGQ][VYYCGGNESLCGERRGSSGGSGGSGGLSGRSDNHGGGSEVQLVESGGGLVQPKGSLKLSCAASGFTFN
TYAMNWVRQAPGKGLEWVARIRSKYNNYATYYADSVKDRFTISRDDSQSILYLQMNNLKTEDTAMYYCVRHGNFGNS
YVSWFAYWGQGTLVTVSAGGGGSGGGGSGGGGSQAVVTQESALTTSPGETVTLTCRSSTGAVTTSNYANWVQEKPDH
LFTGLIGGTNKRAPGVPARFSGSLIGDKAALTITGAQTEDEAIYFCALWYSNLWVFGGGTKLTVLGGSLDPKSSDKT
HTCPPCPAPELLGGPSVFLFPPKPKDTLMISRTPEVTCVVVDVSHEDPEVKFNWYVDGVEVHNAKTKPREEQYNSTY
RVVSVLTVLHQDWLNGKEYKCKVSNKALPAPIEKTISKAKGQPREPQVYTLPPSREEMTKNQVSLTCLVKGFYPSDI
AVEWESNGQPENNYKTTPPVLDSDGSFFLYSKLTVDKSRWQQGNVFSCSVMHEALHNHYTQKSLSLSPGK]
15864-1204-SP34scFv(HvLv)
Nucleotide sequence
[spacer (SEQ ID NO: 507)][15864-1204-SP34scFv(HvLv) without spacer (SEQ ID
NO: 579)]
(SEQ ID NO: 45)
[CAAGGCCAGTCTGGCCAA][TTTATGTGCCAGCAGCGGATGTGGGGGAATGAGTTTTGCCATCAGGGCTCGAGCGG
TGGCAGCGGTGGCTCTGGTGGTCTGAGCGGCCGTTCCGATAATCATGGCGGCGGTTCTGAAGTGCAGCTGGTGGAAT
CTGGGGGCGGACTGGTGCAGCCTAAGGGCAGCCTGAAGCTGAGCTGTGCCGCCAGCGGCTTCACCTTCAACACCTAC
GCCATGAACTGGGTGCGCCAGGCCCCTGGCAAAGGCCTGGAATGGGTGGCCCGGATCAGAAGCAAGTACAACAATTA
CGCCACCTACTACGCCGACAGCGTGAAGGACAGATTCACCATCAGCCGGGACGACAGCCAGAGCATCCTGTACCTGC
AGATGAACAACCTGAAAACCGAGGACACCGCCATGTACTACTGCGTGCGGCACGGCAACTTCGGCAACAGCTATGTG
TCTTGGTTTGCCTACTGGGGCCAGGGCACCCTCGTGACAGTGTCTGCCGGTGGTGGTGGTAGTGGTGGCGGTGGTTC
AGGCGGTGGCGGTAGCCAGGCTGTCGTGACACAGGAAAGCGCCCTGACCACCAGCCCTGGCGAGACAGTGACCCTGA
CCTGTAGAAGCAGCACAGGCGCCGTGACCACAAGCAACTACGCCAATTGGGTGCAGGAAAAGCCCGACCACCTGTTC
ACCGGCCTGATCGGCGGCACCAACAAAAGGGCTCCAGGCGTGCCAGCCAGATTCAGCGGCTCCCTGATCGGAGATAA
GGCCGCCCTGACAATCACTGGCGCCCAGACCGAGGACGAGGCCATCTACTTTTGCGCCCTGTGGTACAGCAACCTGT
GGGTGTTCGGCGGAGGCACCAAGCTGACCGTGCTG]
Amino Acid sequence
[spacer (SEQ ID NO: 87)][15864-1204-SP34scFv(HvLv) without spacer (SEQ ID
NO: 580)]
(SEQ ID NO: 46)
[QGQSGQ][FMCQQRMWGNEFCHQGSSGGSGGSGGLSGRSDNHGGGSEVQLVESGGGLVQPKGSLKLSCAASGFTFN
TYAMNWVRQAPGKGLEWVARIRSKYNNYATYYADSVKDRFTISRDDSQSILYLQMNNLKTEDTAMYYCVRHGNFGNS
YVSWFAYWGQGTLVTVSAGGGGSGGGGSGGGGSQAVVTQESALTTSPGETVTLTCRSSTGAVTTSNYANWVQEKPDH
LFTGLIGGTNKRAPGVPARFSGSLIGDKAALTITGAQTEDEAIYFCALWYSNLWVFGGGTKLTVL]
Activatable antibody 15864-1204-SP34scFv(HvLv)-Fc fusion
[spacer (SEQ ID NO: 507)][Activatable antibody 15864-1204-SP34scFv(HvLv)-Fc
fusion without spacer (SEQ ID NO: 581)]
(SEQ ID NO: 47)
[CAAGGCCAGTCTGGCCAA][TTTATGTGCCAGCAGCGGATGTGGGGGAATGAGTTTTGCCATCAGGGCTCGAGCGG
TGGCAGCGGTGGCTCTGGTGGTCTGAGCGGCCGTTCCGATAATCATGGCGGCGGTTCTGAAGTGCAGCTGGTGGAAT
CTGGGGGCGGACTGGTGCAGCCTAAGGGCAGCCTGAAGCTGAGCTGTGCCGCCAGCGGCTTCACCTTCAACACCTAC
GCCATGAACTGGGTGCGCCAGGCCCCTGGCAAAGGCCTGGAATGGGTGGCCCGGATCAGAAGCAAGTACAACAATTA
CGCCACCTACTACGCCGACAGCGTGAAGGACAGATTCACCATCAGCCGGGACGACAGCCAGAGCATCCTGTACCTGC
AGATGAACAACCTGAAAACCGAGGACACCGCCATGTACTACTGCGTGCGGCACGGCAACTTCGGCAACAGCTATGTG
TCTTGGTTTGCCTACTGGGGCCAGGGCACCCTCGTGACAGTGTCTGCCGGTGGTGGTGGTAGTGGTGGCGGTGGTTC
AGGCGGTGGCGGTAGCCAGGCTGTCGTGACACAGGAAAGCGCCCTGACCACCAGCCCTGGCGAGACAGTGACCCTGA
CCTGTAGAAGCAGCACAGGCGCCGTGACCACAAGCAACTACGCCAATTGGGTGCAGGAAAAGCCCGACCACCTGTTC
ACCGGCCTGATCGGCGGCACCAACAAAAGGGCTCCAGGCGTGCCAGCCAGATTCAGCGGCTCCCTGATCGGAGATAA
GGCCGCCCTGACAATCACTGGCGCCCAGACCGAGGACGAGGCCATCTACTTTTGCGCCCTGTGGTACAGCAACCTGT
GGGTGTTCGGCGGAGGCACCAAGCTGACCGTGCTGGGCGGCTCCCTGGACCCTAAGTCATCTGACAAAACTCACACA
TGCCCACCGTGCCCAGCACCTGAACTCCTGGGGGGACCGTCAGTCTTCCTCTTCCCCCCAAAACCCAAGGACACCCT
CATGATCTCCCGGACCCCTGAGGTCACATGCGTGGTGGTGGACGTGAGCCACGAAGACCCTGAGGTCAAGTTCAACT
GGTACGTGGACGGCGTGGAGGTGCATAATGCCAAGACAAAGCCGCGGGAGGAGCAGTACAACAGCACGTACCGTGTG
GTCAGCGTCCTCACCGTCCTGCACCAGGACTGGCTGAATGGCAAGGAGTACAAGTGCAAGGTCTCCAACAAAGCCCT
CCCAGCCCCCATCGAGAAAACCATCTCCAAAGCCAAAGGGCAGCCCCGAGAACCACAGGTGTACACCCTGCCCCCAT
CCCGGGAGGAGATGACCAAGAACCAGGTCAGCCTGACCTGCCTGGTCAAAGGCTTCTATCCCAGCGACATCGCCGTG
GAGTGGGAGAGCAATGGGCAGCCGGAGAACAACTACAAGACCACGCCTCCCGTGCTGGACTCCGACGGCTCCTTCTT
CCTCTACAGCAAGCTCACCGTGGACAAGAGCAGGTGGCAGCAGGGGAACGTCTTCTCATGCTCCGTGATGCATGAGG
CTCTGCACAACCACTACACGCAGAAGAGCCTCTCCCTGTCTCCGGGTAAA]
Amino Acid sequence
[spacer (SEQ ID NO: 87)][Activatable antibody 15864-1204-SP34scFv(HvLv)-Fc
fusion without spacer (SEQ ID NO: 582)]
(SEQ ID NO: 48)
[QGQSGQ][FMCQQRMWGNEFCHQGSSGGSGGSGGLSGRSDNHGGGSEVQLVESGGGLVQPKGSLKLSCAASGFTFN
TYAMNWVRQAPGKGLEWVARIRSKYNNYATYYADSVKDRFTISRDDSQSILYLQMNNLKTEDTAMYYCVRHGNFGNS
YVSWFAYWGQGTLVTVSAGGGGSGGGGSGGGGSQAVVTQESALTTSPGETVTLTCRSSTGAVTTSNYANWVQEKPDH
LFTGLIGGTNKRAPGVPARFSGSLIGDKAALTITGAQTEDEAIYFCALWYSNLWVFGGGTKLTVLGGSLDPKSSDKT
HTCPPCPAPELLGGPSVFLFPPKPKDTLMISRTPEVTCVVVDVSHEDPEVKFNWYVDGVEVHNAKTKPREEQYNSTY
RVVSVLTVLHQDWLNGKEYKCKVSNKALPAPIEKTISKAKGQPREPQVYTLPPSREEMTKNQVSLTCLVKGFYPSDI
AVEWESNGQPENNYKTTPPVLDSDGSFFLYSKLTVDKSRWQQGNVFSCSVMHEALHNHYTQKSLSLSPGK]
15865-1204-SP34scFv(HvLv)
Nucleotide sequence
[spacer (SEQ ID NO: 507)][15865-1204-SP34scFv(HvLv) without spacer (SEQ ID
NO: 583)]
(SEQ ID NO: 49)
[CAAGGCCAGTCTGGCCAA][ATGATGTATTGCGGTGGGAATGAGGTGTTGTGCGGGCCGCGGGTTGGCTCGAGCGG
TGGCAGCGGTGGCTCTGGTGGTCTGAGCGGCCGTTCCGATAATCATGGCGGCGGTTCTGAAGTGCAGCTGGTGGAAT
CTGGGGGCGGACTGGTGCAGCCTAAGGGCAGCCTGAAGCTGAGCTGTGCCGCCAGCGGCTTCACCTTCAACACCTAC
GCCATGAACTGGGTGCGCCAGGCCCCTGGCAAAGGCCTGGAATGGGTGGCCCGGATCAGAAGCAAGTACAACAATTA
CGCCACCTACTACGCCGACAGCGTGAAGGACAGATTCACCATCAGCCGGGACGACAGCCAGAGCATCCTGTACCTGC
AGATGAACAACCTGAAAACCGAGGACACCGCCATGTACTACTGCGTGCGGCACGGCAACTTCGGCAACAGCTATGTG
TCTTGGTTTGCCTACTGGGGCCAGGGCACCCTCGTGACAGTGTCTGCCGGTGGTGGTGGTAGTGGTGGCGGTGGTTC
AGGCGGTGGCGGTAGCCAGGCTGTCGTGACACAGGAAAGCGCCCTGACCACCAGCCCTGGCGAGACAGTGACCCTGA
CCTGTAGAAGCAGCACAGGCGCCGTGACCACAAGCAACTACGCCAATTGGGTGCAGGAAAAGCCCGACCACCTGTTC
ACCGGCCTGATCGGCGGCACCAACAAAAGGGCTCCAGGCGTGCCAGCCAGATTCAGCGGCTCCCTGATCGGAGATAA
GGCCGCCCTGACAATCACTGGCGCCCAGACCGAGGACGAGGCCATCTACTTTTGCGCCCTGTGGTACAGCAACCTGT
GGGTGTTCGGCGGAGGCACCAAGCTGACCGTGCTG]
Amino Acid sequence
[spacer (SEQ ID NO: 87)][15865-1204-SP34scFv(HvLv) without spacer (SEQ ID
NO: 584)]
(SEQ ID NO: 50)
[QGQSGQ][MMYCGGNEVLCGPRVGSSGGSGGSGGLSGRSDNHGGGSEVQLVESGGGLVQPKGSLKLSCAASGFTFN
TYAMNWVRQAPGKGLEWVARIRSKYNNYATYYADSVKDRFTISRDDSQSILYLQMNNLKTEDTAMYYCVRHGNFGNS
YVSWFAYWGQGTLVTVSAGGGGSGGGGSGGGGSQAVVTQESALTTSPGETVTLTCRSSTGAVTTSNYANWVQEKPDH
LFTGLIGGTNKRAPGVPARFSGSLIGDKAALTITGAQTEDEAIYFCALWYSNLWVFGGGTKLTVL]
Activatable antibody 15865-1204-SP34 scFv(HvLv)-Fc fusion
Nucleotide sequence
[spacer (SEQ ID NO: 507)][Activatable antibody 15865-1204-SP34scFv(HvLv)-Fc
fusion without spacer (SEQ ID NO: 585)]
(SEQ ID NO: 51)
[CAAGGCCAGTCTGGCCAA][ATGATGTATTGCGGTGGGAATGAGGTGTTGTGCGGGCCGCGGGTTGGCTCGAGCGG
TGGCAGCGGTGGCTCTGGTGGTCTGAGCGGCCGTTCCGATAATCATGGCGGCGGTTCTGAAGTGCAGCTGGTGGAAT
CTGGGGGCGGACTGGTGCAGCCTAAGGGCAGCCTGAAGCTGAGCTGTGCCGCCAGCGGCTTCACCTTCAACACCTAC
GCCATGAACTGGGTGCGCCAGGCCCCTGGCAAAGGCCTGGAATGGGTGGCCCGGATCAGAAGCAAGTACAACAATTA
CGCCACCTACTACGCCGACAGCGTGAAGGACAGATTCACCATCAGCCGGGACGACAGCCAGAGCATCCTGTACCTGC
AGATGAACAACCTGAAAACCGAGGACACCGCCATGTACTACTGCGTGCGGCACGGCAACTTCGGCAACAGCTATGTG
TCTTGGTTTGCCTACTGGGGCCAGGGCACCCTCGTGACAGTGTCTGCCGGTGGTGGTGGTAGTGGTGGCGGTGGTTC
AGGCGGTGGCGGTAGCCAGGCTGTCGTGACACAGGAAAGCGCCCTGACCACCAGCCCTGGCGAGACAGTGACCCTGA
CCTGTAGAAGCAGCACAGGCGCCGTGACCACAAGCAACTACGCCAATTGGGTGCAGGAAAAGCCCGACCACCTGTTC
ACCGGCCTGATCGGCGGCACCAACAAAAGGGCTCCAGGCGTGCCAGCCAGATTCAGCGGCTCCCTGATCGGAGATAA
GGCCGCCCTGACAATCACTGGCGCCCAGACCGAGGACGAGGCCATCTACTTTTGCGCCCTGTGGTACAGCAACCTGT
GGGTGTTCGGCGGAGGCACCAAGCTGACCGTGCTGGGCGGCTCCCTGGACCCTAAGTCATCTGACAAAACTCACACA
TGCCCACCGTGCCCAGCACCTGAACTCCTGGGGGGACCGTCAGTCTTCCTCTTCCCCCCAAAACCCAAGGACACCCT
CATGATCTCCCGGACCCCTGAGGTCACATGCGTGGTGGTGGACGTGAGCCACGAAGACCCTGAGGTCAAGTTCAACT
GGTACGTGGACGGCGTGGAGGTGCATAATGCCAAGACAAAGCCGCGGGAGGAGCAGTACAACAGCACGTACCGTGTG
GTCAGCGTCCTCACCGTCCTGCACCAGGACTGGCTGAATGGCAAGGAGTACAAGTGCAAGGTCTCCAACAAAGCCCT
CCCAGCCCCCATCGAGAAAACCATCTCCAAAGCCAAAGGGCAGCCCCGAGAACCACAGGTGTACACCCTGCCCCCAT
CCCGGGAGGAGATGACCAAGAACCAGGTCAGCCTGACCTGCCTGGTCAAAGGCTTCTATCCCAGCGACATCGCCGTG
GAGTGGGAGAGCAATGGGCAGCCGGAGAACAACTACAAGACCACGCCTCCCGTGCTGGACTCCGACGGCTCCTTCTT
CCTCTACAGCAAGCTCACCGTGGACAAGAGCAGGTGGCAGCAGGGGAACGTCTTCTCATGCTCCGTGATGCATGAGG
CTCTGCACAACCACTACACGCAGAAGAGCCTCTCCCTGTCTCCGGGTAAA]
Amino Acid sequence
[spacer (SEQ ID NO: 87)][Activatable antibody 15865-1204-SP34scFv(HvLv)-Fc
fusion without spacer (SEQ ID NO: 586)]
(SEQ ID NO: 52)
[QGQSGQ][MMYCGGNEVLCGPRVGSSGGSGGSGGLSGRSDNHGGGSEVQLVESGGGLVQPKGSLKLSCAASGFTFN
TYAMNWVRQAPGKGLEWVARIRSKYNNYATYYADSVKDRFTISRDDSQSILYLQMNNLKTEDTAMYYCVRHGNFGNS
YVSWFAYWGQGTLVTVSAGGGGSGGGGSGGGGSQAVVTQESALTTSPGETVTLTCRSSTGAVTTSNYANWVQEKPDH
LFTGLIGGTNKRAPGVPARFSGSLIGDKAALTITGAQTEDEAIYFCALWYSNLWVFGGGTKLTVLGGSLDPKSSDKT
HTCPPCPAPELLGGPSVFLFPPKPKDTLMISRTPEVTCVVVDVSHEDPEVKFNWYVDGVEVHNAKTKPREEQYNSTY
RVVSVLTVLHQDWLNGKEYKCKVSNKALPAPIEKTISKAKGQPREPQVYTLPPSREEMTKNQVSLTCLVKGFYPSDI
AVEWESNGQPENNYKTTPPVLDSDGSFFLYSKLTVDKSRWQQGNVFSCSVMHEALHNHYTQKSLSLSPGK]

### Example 3

### In Vitro Characterization of Activatable Anti-CD3ε Antibodies

[0596] This Example describes the ability of a masking moiety of the disclosure to reduce the ability of activatable anti-CD3ε antibodies of the disclosure comprising such a masking moiety to bind to CD3ε.

[0597] To determine if the masking peptides described in the previous examples could inhibit binding in the SP34 scFv-Fc context, a flow cytometry-based binding assay was performed. Jurkat T cells (Clone E6-1, ATCC, TIB-152) were cultured in RPMI-1640+glutamax (Life Technologies, Catalog 72400-120), 10% Heat Inactivated-Fetal Bovine Serum (HI-FBS, Life Technologies, Catalog 10438-026), 100 U/ml penicillin, and 100 μg/ml streptomycin (Life Technologies, Catalog 15140-122) according to ATCC guidelines. Cells were harvested by centrifugation (200×g, 4° C., 5 min) and re-suspended in PBS supplemented with 2% HI-FBS (FACS Buffer). About 180,000 Jurkats per well were transferred to a 96-well U-bottom plate, harvested, and re-suspended in 50 μL of primary antibody. The starting concentration of activatable antibody was 1 μM followed by 3-fold serial dilutions for a total of 12 concentrations. That following activatable antibodies were tested; 15003-1204-SP34scFv(LvHv)-Fc fusion; 15860-1204-SP34scFv(LvHv)-Fc fusion; 15864-1204-SP34scFv(LvHv)-Fc fusion; and 15865-1204-SP34scFv(LvHv)-Fc fusion; as was antibody SP34scFv(LvHv)-Fc.

[0598] Cells were incubated at 4° C. with shaking for about 1 hour, harvested, and washed with 3×200 μL of FACS Buffer. Jurkats were resuspended in 50 μl Alexa Fluor 488 conjugated anti-Human IgG Fc (1:100 dilution, Jackson ImmunoResearch, Product 109-546-098) and incubated at 4° C. with shaking for about 30 min. Cells were harvested, washed with 3×200 μL of FACS Buffer, and resuspended in a final volume of 120 μL of FACS Buffer. Samples were collected on a BD Accuri C6 (BD Biosciences) and the median fluorescence intensity (MFI) of viable cells was calculated using FlowJo V10 (Treestar). EC₅₀ values were calculated in GraphPad Prism 6 by curve fitting the data to log(agonist) vs. response (three parameters).

[0599] FIGS. 3A-3D demonstrate that incorporation of the masking peptides into the SP34 scFv-Fc context to produce activatable antibodies shifted the EC₅₀ values for CD3ε binding from single digit to triple digit nM.

### Example 4

### Bispecific Activatable Antibodies

[0600] This Example describes the production, expression and characterization of bispecific activatable antibodies of the disclosure.

[0601] Vector Construction:

[0602] The heavy chain and light chain were cloned separately into a mammalian expression vector using standard molecular biology techniques. Briefly, DNA fragments encoding the region of interest were amplified with primers binding to the terminal ends. Overlapping fragments were combined and amplified with flanking primers as needed to build the entire desired region. DNA fragments were subsequently cloned into expression vector using a commercially available homologous recombination kit (MCLabs, South San Francisco, Calif.). The in-house mammalian expression vector is a modified version of cDNA3.1(+) from Invitrogen with selection marker of G418 or hygromycin. Mutations were introduced using the QuikChange Kit (Agilent, Santa Clara, Calif.).

[0603] Bispecific antibodies and bispecific activatable antibodies were expressed in mammalian cells using standard transfection kit (Life Technologies, Grand Island, N.Y.). Briefly, 293 cells were transfected with nucleic acids using a lipid based system, following manufactures recommended protocol. Bispecific activatable antibodies and bispecific antibodies were purified from cell-free supernatant using Protein A beads (GE, Piscataway, N.J.) and concentrated using standard buffer exchange columns (Millipore, Temecula, Calif.).

[0604] Table 11 below describes the heavy chains and light chains for various bispecific antibodies and bispecific activatable antibodies of the disclosure.

TABLE 11
Bispecific antibodies and bispecific activatable antibodies

| Molecule | | | |
|---|---|---|---|
| Name | Molecule | Heavy Chain | Light Chain |
| CI005 | C225v5N297Q-CD3- | pLW019: HC | OPP007: LC C225 |
| | H-N | C225v5N297Q- | |
| | | CD3HvLv-H-N | |
| CI007 | 3954-1204- | pLW019: HC | OPP022: LC C225 3954-1204 |
| | C225v5N297Q-CD3- | C225v5N297Q- | |
| | H-N | CD3HvLv-H-N | |
| CI009 | C225v5N297Q-15865- | pLW023: HC | OPP007: LC C225 |
| | CD3LvHv-H-N | C225v5N297Q-15865- | |
| | | CD3LvHv-H-N | |
| CI010 | 3954-1204- | pLW022: HC | OPP022: LC C225 3954-1204 |
| | C225v5N297Q-15003- | C225v5N297Q-15003- | |
| | CD3LvHv-H-N | CD3LvHv-H-N | |
| CI011 | 3954-1204- | pLW023: HC | OPP022: LC C225 3954-1204 |
| | C225v5N297Q-15865- | C225v5N297Q-15865- | |
| | CD3LvHv-H-N | CD3LvHv-H-N | |
| CI012 | C225v5N297Q | pLW006: HC | OPP021: LC C225 |
| | | C225v5N297Q | |
| CI015 | C225v5N297Q- | pLW057: HC | OPP021: LC C225 |
| | CD3LvHv-H-N | C225v5N297Q- | |
| | | CD3LvHv-H-N | |
| CI016 | 3954-1204- | pLW057: HC | OPP022: LC C225 3954-1204 |
| | C225v5N297Q- | C225v5N297Q- | |
| | CD3LvHv-H-N | CD3LvHv-H-N | |
| CI021 | C225v5N297Q-15003- | pLW047: HC | OPP021: LC C225 |
| | CD3HvLv-H-N | C225v5N297Q-15003- | |
| | | CD3HvLv-H-N | |
| CI022 | C225v5N297Q-15865- | pLW048: HC | OPP021: LC C225 |
| | CD3HvLv-H-N | C225v5N297Q-15865- | |
| | | CD3HvLv-H-N | |
| CI023 | 3954-1204- | pLW047: HC | OPP022: LC C225 3954-1204 |
| | C225v5N297Q-15003- | C225v5N297Q-15003- | |
| | CD3HvLv-H-N | CD3HvLv-H-N | |
| CI024 | 3954-1204- | pLW048: HC | OPP022: LC C225 3954-1204 |
| | C225v5N297Q-15865- | C225v5N297Q-15865- | |
| | CD3HvLv-H-N | CD3HvLv-H-N | |
| CI025 | IL6RN297Q | pLW078: HC | pLW077: LC IL6R |
| | | IL6RN297Q | |
| CI026 | IL6RN297Q- | pLW083: HC | pLW077: LC IL6R |
| | CD3LvHv-H-N | IL6RN297Q-CD3LvHv- | |
| | | H-N | |
| CI027 | IL6RN297Q- | pLW085: HC | pLW077: LC IL6R |
| | 15865_1204- | IL6RN297Q-15865_1204- | |
| | CD3LvHv-H-N | CD3LvHv-H-N | |
| CI028 | IL6R 4792 Nsub | pLW085: HC | pLW079: LC IL6R 4792 Nsub |
| | N297Q-15865_1204- | IL6RN297Q-15865_1204- | |
| | CD3LvHv-H-N | CD3LvHv-H-N | |
| CI029 | 4792-1204- | pLW085: HC | pLW080: LC IL6R 4792 1204 |
| | IL6RN297Q- | IL6RN297Q-15865_1204- | (C040) |
| | 15865_1204- | CD3LvHv-H-N | |
| | CD3LvHv-H-N | | |
| CI030 | IL6RN297Q- | pLW087: HC | pLW077: LC IL6R |
| | 15865_Nsub- | IL6RN297Q- | |
| | CD3LvHv-H-N | 15865_Nsub-CD3LvHv- | |
| | | H-N | |
| CI031 | IL6R 4792 | pLW087: HC | pLW079: LC IL6R 4792 Nsub |
| | NsubN297Q- | IL6RN297Q- | |
| | 15865_Nsub- | 15865_Nsub-CD3LvHv- | |
| | CD3LvHv-H-N | H-N | |
| CI032 | 4792-1204- | pLW087: HC | pLW080: LC IL6R 4792 1204 |
| | IL6RN297Q- | IL6RN297Q- | |
| | 15865_Nsub- | 15865_Nsub-CD3LvHv- | |
| | CD3LvHv-H-N | H-N | |
| CI036 | 4792-1204- | pLW083: HC | pLW080: LC IL6R 4792 1204 |
| | IL6RN297Q- | IL6RN297Q-CD3LvHv- | |
| | CD3LvHv-H-N | H-N | |
| CI039 | 3954-2001-C225v5 | pLW101: HC | LC C225-3954-2001 |
| | N297Q-15865-2001- | C225v5N297Q-15865- | |
| | CD3LvHv-H-N | 2001-CD3LvHv-H-N | |
| CI040 | 3954- | pLW101: HC | LC C225-3954-2001 |
| | 2001C225v5N297Q- | C225v5N297Q-15865- | |
| | 15865-2001- | 2001-CD3LvHv-H-N | |
| | CD3LvHv-H-N | | |
| CI048 | activated bispecific | pLW023: HC | OPP022: LC C225 3954-1204 |
| | activatable antibody | C225v5N297Q-15865- | |
| | C225N297Q- | CD3LvHv-H-N | |
| | *CD3LvHv-H-N | | |
| CI049 | 3954-1204- | pLW121: HC | OPP022: LC C225 3954-1204 |
| | C225v5N297Q-MC05- | C225v5N297Q-MC05- | |
| | 2001-mCD3-H-N | 2001-mCD3-H-N | |
| CI050 | 3954-1204- | pLW122: HC | OPP022: LC C225 3954-1204 |
| | C225v5N297Q-MC06- | C225v5N297Q-MC06- | |
| | 2001-mCD3-H-N | 2001-mCD3-H-N | |
| CI051 | 3954-1204- | pLW123: HC | OPP022: LC C225 3954-1204 |
| | C225v5N297Q-MC07- | C225v5N297Q-MC07- | |
| | 2001-mCD3-H-N | 2001-mCD3-H-N | |
| CI052 | C225v5N297Q-mCD3- | pLW100: HC | OPP021: LC C225 |
| | H-N | C225v5N297Q-mCD3-H-N | |
| CI053 | 3954-1204- | pLW117: HC | OPP022: LC C225 3954-1204 |
| | C225v5N297Q-MC01- | C225v5N297Q-MC01- | |
| | 2001-mCD3-H-N | 2001-mCD3-H-N | |
| CI054 | 3954-1204- | pLW118: HC | OPP022: LC C225 3954-1204 |
| | C225v5N297Q-MC02- | C225v5N297Q-MC02- | |
| | 2001-mCD3-H-N | 2001-mCD3-H-N | |
| CI055 | 3954-1204- | pLW119: HC | OPP022: LC C225 3954-1204 |
| | C225v5N297Q-MC03- | C225v5N297Q-MC03- | |
| | 2001-mCD3-H-N | 2001-mCD3-H-N | |
| CI056 | 3954-1204- | pLW120: HC | OPP022: LC C225 3954-1204 |
| | C225v5N297Q-MC04- | C225v5N297Q-MC04- | |
| | 2001-mCD3-H-N | 2001-mCD3-H-N | |
| CI057 | 3954-1204- | pLW124: HC | OPP022: LC C225 3954-1204 |
| | C225v5N297Q-MC08- | C225v5N297Q-MC08- | |
| | 2001-mCD3-H-N | 2001-mCD3-H-N | |
| CI058 | 3954-1204- | pLW125: HC | OPP022: LC C225 3954-1204 |
| | C225v5N297Q-MC09- | C225v5N297Q-MC09- | |
| | 2001-mCD3-H-N | 2001-mCD3-H-N | |
| CI059 | BiTE | BiTE | |

[0605] Table 12A provide the primers used for each construct, and Table 12B provides the sequences of the primers used.

TABLE 12A
Primers

| Construct Name | Primers Used in Construction |
|---|---|
| BiTE | oLW017, oLW018 |
| pLW006 | oLW006, oLW007 |
| pLW019 | oLW048, oLW049, oLW050, oLW051 |
| pLW022 | oLW048, oLW061, oLW062, oLW063 |
| pLW023 | oLW048, oLW061, oLW062, oLW063 |
| pLW047 | oLW048, oLW049, oLW051, oLW098, oLW101, |
| | oLW102 |
| pLW048 | oLW048, oLW049, oLW051, oLW098, oLW101, |
| | oLW103 |
| pLW057 | oLW048, oLW056, oLW063, oLW109 |
| pLW077 | oLW048, oLW056, oLW115, oLW116 |
| pLW078 | oLW048, oLW049, oLW117, oLW118, oLW119, |
| | oLW120 |
| pLW080 | oLW048, oLW121 |
| pLW083 | oLW048, oLW123, oLW124, oLW125 |
| pLW085 | oLW048, oLW123, oLW124, oLW125 |
| pLW101 | oLW048, oLW151, oLW062, oLW063 |
| pLW117 | oLW048, oLW049, oLW178 |
| pLW118 | oLW048, oLW049, oLW178 |
| pLW119 | oLW048, oLW049, oLW178 |
| pLW120 | oLW048, oLW049, oLW178 |
| pLW121 | oLW048, oLW049, oLW178 |
| pLW122 | oLW048, oLW049, oLW178 |
| pLW123 | oLW048, oLW049, oLW178 |
| pLW124 | oLW048, oLW049, oLW178 |
| pLW125 | oLW048, oLW049, oLW178 |

TABLE 12B
Primer Sequences

| Primer | | SEQ ID |
|---|---|---|
| Name | Primer Sequence | NO: |
| oLW001 | CATACACTGGTATCAGCAAAGAACACAGGGTTCTCC | 412 |
| | AAGGC | |
| oLW002 | GCCTTGGAGAACCCTGTGTTCTTTGCTGATACCAGT | 413 |
| | GTATG | |
| oLW003 | TTTAAAATGAACAGTCTGCAATCTCAGGACACAGCC | 414 |
| | ATATATTACTGTGCC | |
| oLW004 | GGCACAGTAATATATGGCTGTGTCCTGAGATTGCAG | 415 |
| | ACTGTTCATTTTAAA | |
| oLW006 | CGGGAGGAGCAGTACCAGAGCACGTACCGTGTG | 416 |
| oLW007 | CACACGGTACGTGCTCTGGTACTGCTCCTCCCG | 417 |
| oLW017 | CACCCCATTGACGTCAATGGGAG | 418 |
| oLW018 | GAGGGGCAAACAACAGATGGCTG | 419 |
| oLW048 | TGAACCGTCAGATCACTAGAAGCTTTATTGC | 420 |
| oLW049 | TGGATGTGCACCAGGTGTGACAGC | 421 |
| oLW050 | CTGGCTGTCACACCTGGTGCACATCCAGAGGTGCAG | 422 |
| | CTGGTCGAGTCTGG | |
| oLW051 | AGCTGCACCTGGGATCCACCACCTCCTAGGACAGTC | 423 |
| | AGTTTGGTTCCTCCACC | |
| oLW056 | ACATCTAGCACCACGCAGCCATAGTAGC | 424 |
| oLW061 | GTGACCACGGTCTGAGAACCGCCGCCATGATTATCG | 425 |
| | G | |
| oLW062 | GGCGGCGGTTCTCAGACCGTGGTCACACAGGAGCC | 426 |
| oLW063 | CTCTGTTTCAGCTGCACCTGGGATCCACCACCTCCT | 427 |
| | GAGGAGACGGTGACCAGTGTCCC | |
| oLW098 | AGAACCGCCGCCATGATTATCG | 428 |
| oLW101 | CGTTCCGATAATCATGGCGGCGGTTCTGAGGTGCAG | 429 |
| | CTGGTCGAGTCTGG | |
| oLW102 | CTGGCTGTCACACCTGGTGCACATCCACAAGGCCAG | 430 |
| | TCTGGCCAAGGTTATC | |
| oLW103 | CTGGCTGTCACACCTGGTGCACATCCACAAGGCCAG | 431 |
| | TCTGGCCAAATGATG | |
| oLW109 | CTCCTGCTACTATGGCTGCGTGGTGCTAGATGTCAG | 432 |
| | ACCGTGGTCACACAGGAGCC | |
| oLW115 | CTCCTGCTACTATGGCTGCGTGGTGCTAGATGTGAC | 433 |
| | ATCCAGATGACTCAGTCTCCTAGCTCC | |
| oLW116 | GAAGACAGATGGTGCAGCCACCG | 434 |
| oLW117 | CTGGCTGTCACACCTGGTGCACATCCACAGGTGCAG | 435 |
| | CTGCAGGAGTCCG | |
| oLW118 | GCTAGCACCAAGGGCCCATCG | 436 |
| oLW119 | GGAAGACCGATGGGCCCTTGG | 437 |
| oLW120 | GCCCTCTAGACTCGAGCGGCCGCTCATTTACCCGGA | 438 |
| | GACAGGGAGAG | |
| oLW121 | GCAGGACCCATACTGGCCAGACTGGCCTTGACATCT | 439 |
| | AGCACCACGCAGCCATAGTAGC | |
| oLW123 | GGAGGTGGTGGATCCCAGGTGCAGCTGCAGGAGTCC | 440 |
| | G | |
| oLW124 | CAGCTGCACCTGGGATCCACCACCTCCTGAGGAGAC | 441 |
| | G | |
| oLW125 | ACCGATGGGCCCTTGGTGCTAG | 442 |
| oLW151 | GACCACGGTCTGAGAACCGCCG | 443 |
| oLW178 | CACCTGGTGCACATCCACAAGGC | 444 |

[0606] The sequences for the bispecific antibodies and bispecific activatable antibodies are shown below. In some embodiments, the activatable antibody also includes a spacer sequence. In some embodiments, the spacer is joined directly to the MM of the activatable antibody. In some embodiments, the spacer is joined directly to the MM of the activatable antibody in the structural arrangement from N-terminus to C-terminus of spacer-MM-CM-AB. In some embodiments, the spacer joined directly to the N-terminus of MM of the activatable antibody is selected from the group consisting of QGQSGQG (SEQ ID NO: 407), QGQSGQ (SEQ ID NO: 87), QGQSG (SEQ ID NO: 408), QGQS (SEQ ID NO: 409), QGQ (SEQ ID NO: 410), QG (SEQ ID NO: 411), and Q. In some embodiments, the spacer includes at least the amino acid sequence QGQSGQG (SEQ ID NO: 412). In some embodiments, the spacer includes at least the amino acid sequence QGQSGQG (SEQ ID NO: 407). In some embodiments, the spacer includes at least the amino acid sequence QGQSGQ (SEQ ID NO: 87). In some embodiments, the spacer includes at least the amino acid sequence QGQSG (SEQ ID NO: 408). In some embodiments, the spacer includes at least the amino acid sequence QGQS (SEQ ID NO: 409), In some embodiments, the spacer includes at least the amino acid sequence QGQ (SEQ ID NO: 410). In some embodiments, the spacer includes at least the amino acid sequence QG (SEQ ID NO: 411). In some embodiments, the spacer includes at least the amino acid residue Q.

[0607] While some of the sequences shown below include the spacer sequence of SEQ ID NO: 362, those of ordinary skill in the art appreciate that the multispecific activatable antibodies of the disclosure can include any suitable spacer sequence, such as, for example, a spacer sequence selected from the group consisting of QGQSGQG (SEQ ID NO: 407), QGQSGQ (SEQ ID NO: 87), QGQSG (SEQ ID NO: 408), QGQS (SEQ ID NO: 409), QGQ (SEQ ID NO: 410), QG (SEQ ID NO: 411), and Q.

CI005: C225v5N297Q-CD3-H-N
pLW019: HC C225v5N297Q-CD3HvLv-H-N
Nucleotide Sequence
(SEQ ID NO: 445)
GAGGTGCAGCTGGTCGAGTCTGGAGGAGGATTGGTGCAGCCTGGAGGGTCATTGAAACTCTCATGTGCAGCCTCTGG
ATTCACCTTCAATAAGTACGCCATGAACTGGGTCCGCCAGGCTCCAGGAAAGGGTTTGGAATGGGTTGCTCGCATAA
GAAGTAAATATAATAATTATGCAACATATTATGCCGATTCAGTGAAAGACAGGTTCACCATCTCCAGAGATGATTCA
AAAAACACTGCCTATCTACAAATGAACAACTTGAAAACTGAGGACACTGCCGTGTACTACTGTGTGAGACATGGGAA
CTTCGGTAATAGCTACATATCCTACTGGGCTTACTGGGGCCAAGGGACTCTGGTCACCGTCTCCTCAGGTGGTGGTG
GTTCTGGCGGCGGCGGCTCCGGTGGTGGTGGTTCTCAGACTGTTGTGACTCAGGAACCTTCACTCACCGTATCACCT
GGTGGAACAGTCACACTCACTTGTGGCTCCTCGACTGGGGCTGTTACATCTGGCTACTACCCAAACTGGGTCCAACA
AAAACCAGGTCAGGCACCCCGTGGTCTAATAGGTGGGACTAAGTTCCTCGCCCCCGGTACTCCTGCCAGATTCTCAG
GCTCCCTGCTTGGAGGCAAGGCTGCCCTCACCCTCTCAGGGGTACAGCCAGAGGATGAGGCAGAATATTACTGTGCT
CTATGGTACAGCAACCGCTGGGTGTTCGGTGGAGGAACCAAACTGACTGTCCTAGGAGGTGGTGGATCCCAGGTGCA
GCTGAAACAGAGCGGCCCGGGCCTGGTGCAGCCGAGCCAGAGCCTGAGCATTACCTGCACCGTGAGCGGCTTTAGCC
TGACCAACTATGGCGTGCATTGGGTGCGCCAGAGCCCGGGCAAAGGCCTGGAATGGCTGGGCGTGATTTGGAGCGGC
GGCAACACCGATTATAACACCCCGTTTACCAGCCGCCTGAGCATTAACAAAGATAACAGCAAAAGCCAGGTGTTTTT
TAAAATGAACAGCCTGCAAAGCCAGGATACCGCGATTTATTATTGCGCGCGCGCGCTGACCTATTATGATTATGAAT
TTGCGTATTGGGGCCAGGGCACCCTGGTGACCGTGAGCGCGGCTAGCACCAAGGGCCCATCGGTCTTCCCCCTGGCA
CCCTCCTCCAAGAGCACCTCTGGGGGCACAGCGGCCCTGGGCTGCCTGGTCAAGGACTACTTCCCCGAACCGGTGAC
GGTGTCGTGGAACTCAGGCGCCCTGACCAGCGGCGTGCACACCTTCCCGGCTGTCCTACAGTCCTCAGGACTCTACT
CCCTCAGCAGCGTGGTGACCGTGCCCTCCAGCAGCTTGGGCACCCAGACCTACATCTGCAACGTGAATCACAAGCCC
AGCAACACCAAGGTGGACAAGAAAGTTGAGCCCAAATCTTGTGACAAAACTCACACATGCCCACCGTGCCCAGCACC
TGAACTCCTGGGGGGACCGTCAGTCTTCCTCTTCCCCCCAAAACCCAAGGACACCCTCATGATCTCCCGGACCCCTG
AGGTCACATGCGTGGTGGTGGACGTGAGCCACGAAGACCCTGAGGTCAAGTTCAACTGGTACGTGGACGGCGTGGAG
GTGCATAATGCCAAGACAAAGCCGCGGGAGGAGCAGTACCAGAGCACGTACCGTGTGGTCAGCGTCCTCACCGTCCT
GCACCAGGACTGGCTGAATGGCAAGGAGTACAAGTGCAAGGTCTCCAACAAAGCCCTCCCAGCCCCCATCGAGAAAA
CCATCTCCAAAGCCAAAGGGCAGCCCCGAGAACCACAGGTGTACACCCTGCCCCCATCCCGGGAGGAGATGACCAAG
AACCAGGTCAGCCTGACCTGCCTGGTCAAAGGCTTCTATCCCAGCGACATCGCCGTGGAGTGGGAGAGCAATGGGCA
GCCGGAGAACAACTACAAGACCACGCCTCCCGTGCTGGACTCCGACGGCTCCTTCTTCCTCTACAGCAAGCTCACCG
TGGACAAGAGCAGGTGGCAGCAGGGGAACGTCTTCTCATGCTCCGTGATGCATGAGGCTCTGCACAACCACTACACG
CAGAAGAGCCTCTCCCTGTCTCCGGGTAAATGA
Amino Acid Sequence
(SEQ ID NO: 446)
EVQLVESGGGLVQPGGSLKLSCAASGFTFNKYAMNWVRQAPGKGLEWVARIRSKYNNYATYYADSVKDRFTISRDDS
KNTAYLQMNNLKTEDTAVYYCVRHGNFGNSYISYWAYWGQGTLVTVSSGGGGSGGGGSGGGGSQTVVTQEPSLTVSP
GGTVTLTCGSSTGAVTSGYYPNWVQQKPGQAPRGLIGGTKFLAPGTPARFSGSLLGGKAALTLSGVQPEDEAEYYCA
LWYSNRWVFGGGTKLTVLGGGGSQVQLKQSGPGLVQPSQSLSITCTVSGFSLTNYGVHWVRQSPGKGLEWLGVIWSG
GNTDYNTPFTSRLSINKDNSKSQVFFKMNSLQSQDTAIYYCARALTYYDYEFAYWGQGTLVTVSAASTKGPSVFPLA
PSSKSTSGGTAALGCLVKDYFPEPVTVSWNSGALTSGVHTFPAVLQSSGLYSLSSVVTVPSSSLGTQTYICNVNHKP
SNTKVDKKVEPKSCDKTHTCPPCPAPELLGGPSVFLFPPKPKDTLMISRTPEVTCVVVDVSHEDPEVKFNWYVDGVE
VHNAKTKPREEQYQSTYRVVSVLTVLHQDWLNGKEYKCKVSNKALPAPIEKTISKAKGQPREPQVYTLPPSREEMTK
NQVSLTCLVKGFYPSDIAVEWESNGQPENNYKTTPPVLDSDGSFFLYSKLTVDKSRWQQGNVFSCSVMHEALHNHYT
QKSLSLSPGK*
OPP007: LC C225 IL2ss
Nucleotide Sequence
(SEQ ID NO: 447)
GATATCTTGCTGACCCAGAGCCCGGTGATTCTGAGCGTGAGCCCGGGCGAACGTGTGAGCTTTAGCTGCCGCGCGAG
CCAGAGCATTGGCACCAACATTCATTGGTATCAGCAGCGCACCAACGGCAGCCCGCGCCTGCTGATTAAATATGCGA
GCGAAAGCATTAGCGGCATTCCGAGCCGCTTTAGCGGCAGCGGCAGCGGCACCGATTTTACCCTGAGCATTAACAGC
GTGGAAAGCGAAGATATTGCGGATTATTATTGCCAGCAGAACAACAACTGGCCGACCACCTTTGGCGCGGGCACCAA
ACTGGAACTGAAACGTACGGTGGCTGCACCATCTGTCTTCATCTTCCCGCCATCTGATGAGCAGTTGAAATCTGGAA
CTGCCTCTGTTGTGTGCCTGCTGAATAACTTCTATCCCAGAGAGGCCAAAGTACAGTGGAAGGTGGATAACGCCCTC
CAATCGGGTAACTCCCAGGAGAGTGTCACAGAGCAGGACAGCAAGGACAGCACCTACAGCCTCAGCAGCACCCTGAC
GCTGAGCAAAGCAGACTACGAGAAACACAAAGTCTACGCCTGCGAAGTCACCCATCAGGGCCTGAGCTCGCCCGTCA
CAAAGAGCTTCAACAGGGGAGAGTGTTAG
Amino Acid Sequence
(SEQ ID NO: 448)
DILLTQSPVILSVSPGERVSFSCRASQSIGTNIHWYQQRTNGSPRLLIKYASESISGIPSRFSGSGSGTDFTLSINS
VESEDIADYYCQQNNNWPTTFGAGTKLELKRTVAAPSVFIFPPSDEQLKSGTASVVCLLNNFYPREAKVQWKVDNAL
QSGNSQESVTEQDSKDSTYSLSSTLTLSKADYEKHKVYACEVTHQGLSSPVTKSFNRGEC*
CI007: 3954-1204-C225v5N297Q-CD3-H-N
pLW019: HC C225v5N297Q-CD3HvLv-H-N
Nucleotide Sequence
(SEQ ID NO: 445)
GAGGTGCAGCTGGTCGAGTCTGGAGGAGGATTGGTGCAGCCTGGAGGGTCATTGAAACTCTCATGTGCAGCCTCTGG
ATTCACCTTCAATAAGTACGCCATGAACTGGGTCCGCCAGGCTCCAGGAAAGGGTTTGGAATGGGTTGCTCGCATAA
GAAGTAAATATAATAATTATGCAACATATTATGCCGATTCAGTGAAAGACAGGTTCACCATCTCCAGAGATGATTCA
AAAAACACTGCCTATCTACAAATGAACAACTTGAAAACTGAGGACACTGCCGTGTACTACTGTGTGAGACATGGGAA
CTTCGGTAATAGCTACATATCCTACTGGGCTTACTGGGGCCAAGGGACTCTGGTCACCGTCTCCTCAGGTGGTGGTG
GTTCTGGCGGCGGCGGCTCCGGTGGTGGTGGTTCTCAGACTGTTGTGACTCAGGAACCTTCACTCACCGTATCACCT
GGTGGAACAGTCACACTCACTTGTGGCTCCTCGACTGGGGCTGTTACATCTGGCTACTACCCAAACTGGGTCCAACA
AAAACCAGGTCAGGCACCCCGTGGTCTAATAGGTGGGACTAAGTTCCTCGCCCCCGGTACTCCTGCCAGATTCTCAG
GCTCCCTGCTTGGAGGCAAGGCTGCCCTCACCCTCTCAGGGGTACAGCCAGAGGATGAGGCAGAATATTACTGTGCT
CTATGGTACAGCAACCGCTGGGTGTTCGGTGGAGGAACCAAACTGACTGTCCTAGGAGGTGGTGGATCCCAGGTGCA
GCTGAAACAGAGCGGCCCGGGCCTGGTGCAGCCGAGCCAGAGCCTGAGCATTACCTGCACCGTGAGCGGCTTTAGCC
TGACCAACTATGGCGTGCATTGGGTGCGCCAGAGCCCGGGCAAAGGCCTGGAATGGCTGGGCGTGATTTGGAGCGGC
GGCAACACCGATTATAACACCCCGTTTACCAGCCGCCTGAGCATTAACAAAGATAACAGCAAAAGCCAGGTGTTTTT
TAAAATGAACAGCCTGCAAAGCCAGGATACCGCGATTTATTATTGCGCGCGCGCGCTGACCTATTATGATTATGAAT
TTGCGTATTGGGGCCAGGGCACCCTGGTGACCGTGAGCGCGGCTAGCACCAAGGGCCCATCGGTCTTCCCCCTGGCA
CCCTCCTCCAAGAGCACCTCTGGGGGCACAGCGGCCCTGGGCTGCCTGGTCAAGGACTACTTCCCCGAACCGGTGAC
GGTGTCGTGGAACTCAGGCGCCCTGACCAGCGGCGTGCACACCTTCCCGGCTGTCCTACAGTCCTCAGGACTCTACT
CCCTCAGCAGCGTGGTGACCGTGCCCTCCAGCAGCTTGGGCACCCAGACCTACATCTGCAACGTGAATCACAAGCCC
AGCAACACCAAGGTGGACAAGAAAGTTGAGCCCAAATCTTGTGACAAAACTCACACATGCCCACCGTGCCCAGCACC
TGAACTCCTGGGGGGACCGTCAGTCTTCCTCTTCCCCCCAAAACCCAAGGACACCCTCATGATCTCCCGGACCCCTG
AGGTCACATGCGTGGTGGTGGACGTGAGCCACGAAGACCCTGAGGTCAAGTTCAACTGGTACGTGGACGGCGTGGAG
GTGCATAATGCCAAGACAAAGCCGCGGGAGGAGCAGTACCAGAGCACGTACCGTGTGGTCAGCGTCCTCACCGTCCT
GCACCAGGACTGGCTGAATGGCAAGGAGTACAAGTGCAAGGTCTCCAACAAAGCCCTCCCAGCCCCCATCGAGAAAA
CCATCTCCAAAGCCAAAGGGCAGCCCCGAGAACCACAGGTGTACACCCTGCCCCCATCCCGGGAGGAGATGACCAAG
AACCAGGTCAGCCTGACCTGCCTGGTCAAAGGCTTCTATCCCAGCGACATCGCCGTGGAGTGGGAGAGCAATGGGCA
GCCGGAGAACAACTACAAGACCACGCCTCCCGTGCTGGACTCCGACGGCTCCTTCTTCCTCTACAGCAAGCTCACCG
TGGACAAGAGCAGGTGGCAGCAGGGGAACGTCTTCTCATGCTCCGTGATGCATGAGGCTCTGCACAACCACTACACG
CAGAAGAGCCTCTCCCTGTCTCCGGGTAAATGA
Amino Acid Sequence
(SEQ ID NO: 446)
EVQLVESGGGLVQPGGSLKLSCAASGFTFNKYAMNWVRQAPGKGLEWVARIRSKYNNYATYYADSVKDRFTISRDDS
KNTAYLQMNNLKTEDTAVYYCVRHGNFGNSYISYWAYWGQGTLVTVSSGGGGSGGGGSGGGGSQTVVTQEPSLTVSP
GGTVTLTCGSSTGAVTSGYYPNWVQQKPGQAPRGLIGGTKFLAPGTPARFSGSLLGGKAALTLSGVQPEDEAEYYCA
LWYSNRWVFGGGTKLTVLGGGGSQVQLKQSGPGLVQPSQSLSITCTVSGFSLTNYGVHWVRQSPGKGLEWLGVIWSG
GNTDYNTPFTSRLSINKDNSKSQVFFKMNSLQSQDTAIYYCARALTYYDYEFAYWGQGTLVTVSAASTKGPSVFPLA
PSSKSTSGGTAALGCLVKDYFPEPVTVSWNSGALTSGVHTFPAVLQSSGLYSLSSVVTVPSSSLGTQTYICNVNHKP
SNTKVDKKVEPKSCDKTHTCPPCPAPELLGGPSVFLFPPKPKDTLMISRTPEVTCVVVDVSHEDPEVKFNWYVDGVE
VHNAKTKPREEQYQSTYRVVSVLTVLHQDWLNGKEYKCKVSNKALPAPIEKTISKAKGQPREPQVYTLPPSREEMTK
NQVSLTCLVKGFYPSDIAVEWESNGQPENNYKTTPPVLDSDGSFFLYSKLTVDKSRWQQGNVFSCSVMHEALHNHYT
QKSLSLSPGK*
OPP022: LC C225 3954-1204
Nucleotide Sequence
[spacer (SEQ ID NO: 507)][OPP022 without spacer (SEQ ID NO: 509)]
(SEQ ID NO: 449)
[CAAGGCCAGTCTGGCCAG][TGCATCTCACCTCGTGGTTGTCCGGACGGCCCATACGTCATGTACGGCTCGAGCGG
TGGCAGCGGTGGCTCTGGTGGATCCGGTCTGAGCGGCCGTTCCGATAATCATGGCAGTAGCGGTACCCAGATCTTGC
TGACCCAGAGCCCGGTGATTCTGAGCGTGAGCCCGGGCGAACGTGTGAGCTTTAGCTGCCGCGCGAGCCAGAGCATT
GGCACCAACATTCATTGGTATCAGCAGCGCACCAACGGCAGCCCGCGCCTGCTGATTAAATATGCGAGCGAAAGCAT
TAGCGGCATTCCGAGCCGCTTTAGCGGCAGCGGCAGCGGCACCGATTTTACCCTGAGCATTAACAGCGTGGAAAGCG
AAGATATTGCGGATTATTATTGCCAGCAGAACAACAACTGGCCGACCACCTTTGGCGCGGGCACCAAACTGGAACTG
AAACGTACGGTGGCTGCACCATCTGTCTTCATCTTCCCGCCATCTGATGAGCAGTTGAAATCTGGAACTGCCTCTGT
TGTGTGCCTGCTGAATAACTTCTATCCCAGAGAGGCCAAAGTACAGTGGAAGGTGGATAACGCCCTCCAATCGGGTA
ACTCCCAGGAGAGTGTCACAGAGCAGGACAGCAAGGACAGCACCTACAGCCTCAGCAGCACCCTGACGCTGAGCAAA
GCAGACTACGAGAAACACAAAGTCTACGCCTGCGAAGTCACCCATCAGGGCCTGAGCTCGCCCGTCACAAAGAGCTT
CAACAGGGGAGAGTGTTAG]
Amino Acid Sequence
[spacer (SEQ ID NO: 87)][OPP022 without spacer (SEQ ID NO: 508)]
(SEQ ID NO: 450)
[QGQSGQ][CISPRGCPDGPYVMYGSSGGSGGSGGSGLSGRSDNHGSSGTQILLTQSPVILSVSPGERVSFSCRASQ
SIGTNIHWYQQRTNGSPRLLIKYASESISGIPSRFSGSGSGTDFTLSINSVESEDIADYYCQQNNNWPTTFGAGTKL
ELKRTVAAPSVFIFPPSDEQLKSGTASVVCLLNNFYPREAKVQWKVDNALQSGNSQESVTEQDSKDSTYSLSSTLTL
SKADYEKHKVYACEVTHQGLSSPVTKSFNRGEC]*
CI009: C225v5N297Q-15865-CD3LvHv-H-N
pLW023: C225v5N297Q-15865-CD3LvHv-H-N
Nucleotide Sequence
[spacer (SEQ ID NO: 507)][pLW023 without spacer (SEQ ID NO: 511)]
(SEQ ID NO: 451)
[CAAGGCCAGTCTGGCCAA][ATGATGTATTGCGGTGGGAATGAGGTGTTGTGCGGGCCGCGGGTTGGCTCGAGCGG
TGGCAGCGGTGGCTCTGGTGGTCTGAGCGGCCGTTCCGATAATCATGGCGGCGGTTCTCAGACCGTGGTCACACAGG
AGCCCTCACTGACAGTGAGCCCTGGCGGGACCGTCACACTGACTTGTCGCAGTTCAACTGGCGCCGTGACTACCAGC
AATTACGCTAACTGGGTCCAGCAGAAACCAGGACAGGCACCACGAGGACTGATCGGAGGAACTAATAAGAGAGCACC
AGGAACCCCTGCAAGGTTCTCCGGATCTCTGCTGGGGGGAAAAGCCGCTCTGACACTGAGCGGCGTGCAGCCTGAGG
ACGAAGCTGAGTACTATTGCGCACTGTGGTACTCCAACCTGTGGGTGTTTGGCGGGGGAACTAAGCTGACCGTCCTG
GGAGGAGGAGGAAGCGGAGGAGGAGGGAGCGGAGGAGGAGGATCCGAAGTGCAGCTGGTCGAGAGCGGAGGAGGACT
GGTGCAGCCAGGAGGATCCCTGAAGCTGTCTTGTGCAGCCAGTGGCTTCACCTTCAACACTTACGCAATGAACTGGG
TGCGGCAGGCACCTGGGAAGGGACTGGAATGGGTCGCCCGGATCAGATCTAAATACAATAACTATGCCACCTACTAT
GCTGACAGTGTGAAGGATAGGTTCACCATTTCACGCGACGATAGCAAAAACACAGCTTATCTGCAGATGAATAACCT
GAAGACCGAGGATACAGCAGTGTACTATTGCGTCAGACACGGCAATTTCGGGAACTCTTACGTGAGTTGGTTTGCCT
ATTGGGGACAGGGGACACTGGTCACCGTCTCCTCAGGAGGTGGTGGATCCCAGGTGCAGCTGAAACAGAGCGGCCCG
GGCCTGGTGCAGCCGAGCCAGAGCCTGAGCATTACCTGCACCGTGAGCGGCTTTAGCCTGACCAACTATGGCGTGCA
TTGGGTGCGCCAGAGCCCGGGCAAAGGCCTGGAATGGCTGGGCGTGATTTGGAGCGGCGGCAACACCGATTATAACA
CCCCGTTTACCAGCCGCCTGAGCATTAACAAAGATAACAGCAAAAGCCAGGTGTTTTTTAAAATGAACAGCCTGCAA
AGCCAGGATACCGCGATTTATTATTGCGCGCGCGCGCTGACCTATTATGATTATGAATTTGCGTATTGGGGCCAGGG
CACCCTGGTGACCGTGAGCGCGGCTAGCACCAAGGGCCCATCGGTCTTCCCCCTGGCACCCTCCTCCAAGAGCACCT
CTGGGGGCACAGCGGCCCTGGGCTGCCTGGTCAAGGACTACTTCCCCGAACCGGTGACGGTGTCGTGGAACTCAGGC
GCCCTGACCAGCGGCGTGCACACCTTCCCGGCTGTCCTACAGTCCTCAGGACTCTACTCCCTCAGCAGCGTGGTGAC
CGTGCCCTCCAGCAGCTTGGGCACCCAGACCTACATCTGCAACGTGAATCACAAGCCCAGCAACACCAAGGTGGACA
AGAAAGTTGAGCCCAAATCTTGTGACAAAACTCACACATGCCCACCGTGCCCAGCACCTGAACTCCTGGGGGGACCG
TCAGTCTTCCTCTTCCCCCCAAAACCCAAGGACACCCTCATGATCTCCCGGACCCCTGAGGTCACATGCGTGGTGGT
GGACGTGAGCCACGAAGACCCTGAGGTCAAGTTCAACTGGTACGTGGACGGCGTGGAGGTGCATAATGCCAAGACAA
AGCCGCGGGAGGAGCAGTACCAGAGCACGTACCGTGTGGTCAGCGTCCTCACCGTCCTGCACCAGGACTGGCTGAAT
GGCAAGGAGTACAAGTGCAAGGTCTCCAACAAAGCCCTCCCAGCCCCCATCGAGAAAACCATCTCCAAAGCCAAAGG
GCAGCCCCGAGAACCACAGGTGTACACCCTGCCCCCATCCCGGGAGGAGATGACCAAGAACCAGGTCAGCCTGACCT
GCCTGGTCAAAGGCTTCTATCCCAGCGACATCGCCGTGGAGTGGGAGAGCAATGGGCAGCCGGAGAACAACTACAAG
ACCACGCCTCCCGTGCTGGACTCCGACGGCTCCTTCTTCCTCTACAGCAAGCTCACCGTGGACAAGAGCAGGTGGCA
GCAGGGGAACGTCTTCTCATGCTCCGTGATGCATGAGGCTCTGCACAACCACTACACGCAGAAGAGCCTCTCCCTGT
CTCCGGGTAAATGA]
Amino Acid Sequence
[spacer (SEQ ID NO: 87)][pLW023 without spacer (SEQ ID NO: 512)]
(SEQ ID NO: 452)
[QGQSGQ][MMYCGGNEVLCGPRVGSSGGSGGSGGLSGRSDNHGGGSQTVVTQEPSLTVSPGGTVTLTCRSSTGAVT
TSNYANWVQQKPGQAPRGLIGGTNKRAPGTPARFSGSLLGGKAALTLSGVQPEDEAEYYCALWYSNLWVFGGGTKLT
VLGGGGSGGGGSGGGGSEVQLVESGGGLVQPGGSLKLSCAASGFTFNTYAMNWVRQAPGKGLEWVARIRSKYNNYAT
YYADSVKDRFTISRDDSKNTAYLQMNNLKTEDTAVYYCVRHGNFGNSYVSWFAYWGQGTLVTVSSGGGGSQVQLKQS
GPGLVQPSQSLSITCTVSGFSLTNYGVHWVRQSPGKGLEWLGVIWSGGNTDYNTPFTSRLSINKDNSKSQVFFKMNS
LQSQDTAIYYCARALTYYDYEFAYWGQGTLVTVSAASTKGPSVFPLAPSSKSTSGGTAALGCLVKDYFPEPVTVSWN
SGALTSGVHTFPAVLQSSGLYSLSSVVTVPSSSLGTQTYICNVNHKPSNTKVDKKVEPKSCDKTHTCPPCPAPELLG
GPSVFLFPPKPKDTLMISRTPEVTCVVVDVSHEDPEVKFNWYVDGVEVHNAKTKPREEQYQSTYRVVSVLTVLHQDW
LNGKEYKCKVSNKALPAPIEKTISKAKGQPREPQVYTLPPSREEMTKNQVSLTCLVKGFYPSDIAVEWESNGQPENN
YKTTPPVLDSDGSFFLYSKLTVDKSRWQQGNVFSCSVMHEALHNHYTQKSLSLSPGK]*
OPP007: LC C225 IL2ss
Nucleotide Sequence
(SEQ ID NO: 447)
GATATCTTGCTGACCCAGAGCCCGGTGATTCTGAGCGTGAGCCCGGGCGAACGTGTGAGCTTTAGCTGCCGCGCGAG
CCAGAGCATTGGCACCAACATTCATTGGTATCAGCAGCGCACCAACGGCAGCCCGCGCCTGCTGATTAAATATGCGA
GCGAAAGCATTAGCGGCATTCCGAGCCGCTTTAGCGGCAGCGGCAGCGGCACCGATTTTACCCTGAGCATTAACAGC
GTGGAAAGCGAAGATATTGCGGATTATTATTGCCAGCAGAACAACAACTGGCCGACCACCTTTGGCGCGGGCACCAA
ACTGGAACTGAAACGTACGGTGGCTGCACCATCTGTCTTCATCTTCCCGCCATCTGATGAGCAGTTGAAATCTGGAA
CTGCCTCTGTTGTGTGCCTGCTGAATAACTTCTATCCCAGAGAGGCCAAAGTACAGTGGAAGGTGGATAACGCCCTC
CAATCGGGTAACTCCCAGGAGAGTGTCACAGAGCAGGACAGCAAGGACAGCACCTACAGCCTCAGCAGCACCCTGAC
GCTGAGCAAAGCAGACTACGAGAAACACAAAGTCTACGCCTGCGAAGTCACCCATCAGGGCCTGAGCTCGCCCGTCA
CAAAGAGCTTCAACAGGGGAGAGTGTTAG
Amino Acid Sequence
(SEQ ID NO: 448)
DILLTQSPVILSVSPGERVSFSCRASQSIGTNIHWYQQRTNGSPRLLIKYASESISGIPSRFSGSGSGTDFTLSINS
VESEDIADYYCQQNNNWPTTFGAGTKLELKRTVAAPSVFIFPPSDEQLKSGTASVVCLLNNFYPREAKVQWKVDNAL
QSGNSQESVTEQDSKDSTYSLSSTLTLSKADYEKHKVYACEVTHQGLSSPVTKSFNRGEC*
CI010: 3954-1204-C225v5N297Q-15003-CD3LvHv-H-N
pLW022: C225v5N297Q-15865-CD3LvHv-H-N
Nucleotide Sequence
[spacer (SEQ ID NO: 507)][pLW022 without spacer (SEQ ID NO: 895)]
(SEQ ID NO: 451)
[CAAGGCCAGTCTGGCCAA][GGTTATCGGTGGGGTTGCGAGTGGAATTGCGGTGGGATTACTACTGGCTCGAGCGG
TGGCAGCGGTGGCTCTGGTGGTCTGAGCGGCCGTTCCGATAATCATGGCGGCGGTTCTCAGACCGTGGTCACACAGG
AGCCCTCACTGACAGTGAGCCCTGGCGGGACCGTCACACTGACTTGTCGCAGTTCAACTGGCGCCGTGACTACCAGC
AATTACGCTAACTGGGTCCAGCAGAAACCAGGACAGGCACCACGAGGACTGATCGGAGGAACTAATAAGAGAGCACC
AGGAACCCCTGCAAGGTTCTCCGGATCTCTGCTGGGGGGAAAAGCCGCTCTGACACTGAGCGGCGTGCAGCCTGAGG
ACGAAGCTGAGTACTATTGCGCACTGTGGTACTCCAACCTGTGGGTGTTTGGCGGGGGAACTAAGCTGACCGTCCTG
GGAGGAGGAGGAAGCGGAGGAGGAGGGAGCGGAGGAGGAGGATCCGAAGTGCAGCTGGTCGAGAGCGGAGGAGGACT
GGTGCAGCCAGGAGGATCCCTGAAGCTGTCTTGTGCAGCCAGTGGCTTCACCTTCAACACTTACGCAATGAACTGGG
TGCGGCAGGCACCTGGGAAGGGACTGGAATGGGTCGCCCGGATCAGATCTAAATACAATAACTATGCCACCTACTAT
GCTGACAGTGTGAAGGATAGGTTCACCATTTCACGCGACGATAGCAAAAACACAGCTTATCTGCAGATGAATAACCT
GAAGACCGAGGATACAGCAGTGTACTATTGCGTCAGACACGGCAATTTCGGGAACTCTTACGTGAGTTGGTTTGCCT
ATTGGGGACAGGGGACACTGGTCACCGTCTCCTCAGGAGGTGGTGGATCCCAGGTGCAGCTGAAACAGAGCGGCCCG
GGCCTGGTGCAGCCGAGCCAGAGCCTGAGCATTACCTGCACCGTGAGCGGCTTTAGCCTGACCAACTATGGCGTGCA
TTGGGTGCGCCAGAGCCCGGGCAAAGGCCTGGAATGGCTGGGCGTGATTTGGAGCGGCGGCAACACCGATTATAACA
CCCCGTTTACCAGCCGCCTGAGCATTAACAAAGATAACAGCAAAAGCCAGGTGTTTTTTAAAATGAACAGCCTGCAA
AGCCAGGATACCGCGATTTATTATTGCGCGCGCGCGCTGACCTATTATGATTATGAATTTGCGTATTGGGGCCAGGG
CACCCTGGTGACCGTGAGCGCGGCTAGCACCAAGGGCCCATCGGTCTTCCCCCTGGCACCCTCCTCCAAGAGCACCT
CTGGGGGCACAGCGGCCCTGGGCTGCCTGGTCAAGGACTACTTCCCCGAACCGGTGACGGTGTCGTGGAACTCAGGC
GCCCTGACCAGCGGCGTGCACACCTTCCCGGCTGTCCTACAGTCCTCAGGACTCTACTCCCTCAGCAGCGTGGTGAC
CGTGCCCTCCAGCAGCTTGGGCACCCAGACCTACATCTGCAACGTGAATCACAAGCCCAGCAACACCAAGGTGGACA
AGAAAGTTGAGCCCAAATCTTGTGACAAAACTCACACATGCCCACCGTGCCCAGCACCTGAACTCCTGGGGGGACCG
TCAGTCTTCCTCTTCCCCCCAAAACCCAAGGACACCCTCATGATCTCCCGGACCCCTGAGGTCACATGCGTGGTGGT
GGACGTGAGCCACGAAGACCCTGAGGTCAAGTTCAACTGGTACGTGGACGGCGTGGAGGTGCATAATGCCAAGACAA
AGCCGCGGGAGGAGCAGTACCAGAGCACGTACCGTGTGGTCAGCGTCCTCACCGTCCTGCACCAGGACTGGCTGAAT
GGCAAGGAGTACAAGTGCAAGGTCTCCAACAAAGCCCTCCCAGCCCCCATCGAGAAAACCATCTCCAAAGCCAAAGG
GCAGCCCCGAGAACCACAGGTGTACACCCTGCCCCCATCCCGGGAGGAGATGACCAAGAACCAGGTCAGCCTGACCT
GCCTGGTCAAAGGCTTCTATCCCAGCGACATCGCCGTGGAGTGGGAGAGCAATGGGCAGCCGGAGAACAACTACAAG
ACCACGCCTCCCGTGCTGGACTCCGACGGCTCCTTCTTCCTCTACAGCAAGCTCACCGTGGACAAGAGCAGGTGGCA
GCAGGGGAACGTCTTCTCATGCTCCGTGATGCATGAGGCTCTGCACAACCACTACACGCAGAAGAGCCTCTCCCTGT
CTCCGGGTAAATGA]
Amino Acid Sequence
[spacer (SEQ ID NO: 87)][pLW022 without spacer (SEQ ID NO: 510)]
(SEQ ID NO: 454)
[QGQSGQ][GYRWGCEWNCGGITTGSSGGSGGSGGLSGRSDNHGGGSQTVVTQEPSLTVSPGGTVTLTCRSSTGAVT
TSNYANWVQQKPGQAPRGLIGGTNKRAPGTPARFSGSLLGGKAALTLSGVQPEDEAEYYCALWYSNLWVFGGGTKLT
VLGGGGSGGGGSGGGGSEVQLVESGGGLVQPGGSLKLSCAASGFTFNTYAMNWVRQAPGKGLEWVARIRSKYNNYAT
YYADSVKDRFTISRDDSKNTAYLQMNNLKTEDTAVYYCVRHGNFGNSYVSWFAYWGQGTLVTVSSGGGGSQVQLKQS
GPGLVQPSQSLSITCTVSGFSLTNYGVHWVRQSPGKGLEWLGVIWSGGNTDYNTPFTSRLSINKDNSKSQVFFKMNS
LQSQDTAIYYCARALTYYDYEFAYWGQGTLVTVSAASTKGPSVFPLAPSSKSTSGGTAALGCLVKDYFPEPVTVSWN
SGALTSGVHTFPAVLQSSGLYSLSSVVTVPSSSLGTQTYICNVNHKPSNTKVDKKVEPKSCDKTHTCPPCPAPELLG
GPSVFLFPPKPKDTLMISRTPEVTCVVVDVSHEDPEVKFNWYVDGVEVHNAKTKPREEQYQSTYRVVSVLTVLHQDW
LNGKEYKCKVSNKALPAPIEKTISKAKGQPREPQVYTLPPSREEMTKNQVSLTCLVKGFYPSDIAVEWESNGQPENN
YKTTPPVLDSDGSFFLYSKLTVDKSRWQQGNVFSCSVMHEALHNHYTQKSLSLSPGK]*
OPP022: LC C225 3954-1204
Nucleotide Sequence
[spacer (SEQ ID NO: 507)][OPP022 without spacer (SEQ ID NO: 509)]
(SEQ ID NO: 449)
[CAAGGCCAGTCTGGCCAG][TGCATCTCACCTCGTGGTTGTCCGGACGGCCCATACGTCATGTACGGCTCGAGCGG
TGGCAGCGGTGGCTCTGGTGGATCCGGTCTGAGCGGCCGTTCCGATAATCATGGCAGTAGCGGTACCCAGATCTTGC
TGACCCAGAGCCCGGTGATTCTGAGCGTGAGCCCGGGCGAACGTGTGAGCTTTAGCTGCCGCGCGAGCCAGAGCATT
GGCACCAACATTCATTGGTATCAGCAGCGCACCAACGGCAGCCCGCGCCTGCTGATTAAATATGCGAGCGAAAGCAT
TAGCGGCATTCCGAGCCGCTTTAGCGGCAGCGGCAGCGGCACCGATTTTACCCTGAGCATTAACAGCGTGGAAAGCG
AAGATATTGCGGATTATTATTGCCAGCAGAACAACAACTGGCCGACCACCTTTGGCGCGGGCACCAAACTGGAACTG
AAACGTACGGTGGCTGCACCATCTGTCTTCATCTTCCCGCCATCTGATGAGCAGTTGAAATCTGGAACTGCCTCTGT
TGTGTGCCTGCTGAATAACTTCTATCCCAGAGAGGCCAAAGTACAGTGGAAGGTGGATAACGCCCTCCAATCGGGTA
ACTCCCAGGAGAGTGTCACAGAGCAGGACAGCAAGGACAGCACCTACAGCCTCAGCAGCACCCTGACGCTGAGCAAA
GCAGACTACGAGAAACACAAAGTCTACGCCTGCGAAGTCACCCATCAGGGCCTGAGCTCGCCCGTCACAAAGAGCTT
CAACAGGGGAGAGTGTTAG]
Amino Acid Sequence
[spacer (SEQ ID NO: 87)][OPP022 without spacer (SEQ ID NO: 508)]
(SEQ ID NO: 450)
[QGQSGQ][CISPRGCPDGPYVMYGSSGGSGGSGGSGLSGRSDNHGSSGTQILLTQSPVILSVSPGERVSFSCRASQ
SIGTNIHWYQQRTNGSPRLLIKYASESISGIPSRFSGSGSGTDFTLSINSVESEDIADYYCQQNNNWPTTFGAGTKL
ELKRTVAAPSVFIFPPSDEQLKSGTASVVCLLNNFYPREAKVQWKVDNALQSGNSQESVTEQDSKDSTYSLSSTLTL
SKADYEKHKVYACEVTHQGLSSPVTKSFNRGEC*]
CI011: 3954-1204-C225v5N297Q-15865-CD3LvHv-H-N
pLW023: HC C225v5N297Q-15865-CD3LvHv-H-N
Nucleotide Sequence
[spacer (SEQ ID NO: 507)][pLW023 without spacer (SEQ ID NO: 511)]
(SEQ ID NO: 451)
[CAAGGCCAGTCTGGCCAA][ATGATGTATTGCGGTGGGAATGAGGTGTTGTGCGGGCCGCGGGTTGGCTCGAGCGG
TGGCAGCGGTGGCTCTGGTGGTCTGAGCGGCCGTTCCGATAATCATGGCGGCGGTTCTCAGACCGTGGTCACACAGG
AGCCCTCACTGACAGTGAGCCCTGGCGGGACCGTCACACTGACTTGTCGCAGTTCAACTGGCGCCGTGACTACCAGC
AATTACGCTAACTGGGTCCAGCAGAAACCAGGACAGGCACCACGAGGACTGATCGGAGGAACTAATAAGAGAGCACC
AGGAACCCCTGCAAGGTTCTCCGGATCTCTGCTGGGGGGAAAAGCCGCTCTGACACTGAGCGGCGTGCAGCCTGAGG
ACGAAGCTGAGTACTATTGCGCACTGTGGTACTCCAACCTGTGGGTGTTTGGCGGGGGAACTAAGCTGACCGTCCTG
GGAGGAGGAGGAAGCGGAGGAGGAGGGAGCGGAGGAGGAGGATCCGAAGTGCAGCTGGTCGAGAGCGGAGGAGGACT
GGTGCAGCCAGGAGGATCCCTGAAGCTGTCTTGTGCAGCCAGTGGCTTCACCTTCAACACTTACGCAATGAACTGGG
TGCGGCAGGCACCTGGGAAGGGACTGGAATGGGTCGCCCGGATCAGATCTAAATACAATAACTATGCCACCTACTAT
GCTGACAGTGTGAAGGATAGGTTCACCATTTCACGCGACGATAGCAAAAACACAGCTTATCTGCAGATGAATAACCT
GAAGACCGAGGATACAGCAGTGTACTATTGCGTCAGACACGGCAATTTCGGGAACTCTTACGTGAGTTGGTTTGCCT
ATTGGGGACAGGGGACACTGGTCACCGTCTCCTCAGGAGGTGGTGGATCCCAGGTGCAGCTGAAACAGAGCGGCCCG
GGCCTGGTGCAGCCGAGCCAGAGCCTGAGCATTACCTGCACCGTGAGCGGCTTTAGCCTGACCAACTATGGCGTGCA
TTGGGTGCGCCAGAGCCCGGGCAAAGGCCTGGAATGGCTGGGCGTGATTTGGAGCGGCGGCAACACCGATTATAACA
CCCCGTTTACCAGCCGCCTGAGCATTAACAAAGATAACAGCAAAAGCCAGGTGTTTTTTAAAATGAACAGCCTGCAA
AGCCAGGATACCGCGATTTATTATTGCGCGCGCGCGCTGACCTATTATGATTATGAATTTGCGTATTGGGGCCAGGG
CACCCTGGTGACCGTGAGCGCGGCTAGCACCAAGGGCCCATCGGTCTTCCCCCTGGCACCCTCCTCCAAGAGCACCT
CTGGGGGCACAGCGGCCCTGGGCTGCCTGGTCAAGGACTACTTCCCCGAACCGGTGACGGTGTCGTGGAACTCAGGC
GCCCTGACCAGCGGCGTGCACACCTTCCCGGCTGTCCTACAGTCCTCAGGACTCTACTCCCTCAGCAGCGTGGTGAC
CGTGCCCTCCAGCAGCTTGGGCACCCAGACCTACATCTGCAACGTGAATCACAAGCCCAGCAACACCAAGGTGGACA
AGAAAGTTGAGCCCAAATCTTGTGACAAAACTCACACATGCCCACCGTGCCCAGCACCTGAACTCCTGGGGGGACCG
TCAGTCTTCCTCTTCCCCCCAAAACCCAAGGACACCCTCATGATCTCCCGGACCCCTGAGGTCACATGCGTGGTGGT
GGACGTGAGCCACGAAGACCCTGAGGTCAAGTTCAACTGGTACGTGGACGGCGTGGAGGTGCATAATGCCAAGACAA
AGCCGCGGGAGGAGCAGTACCAGAGCACGTACCGTGTGGTCAGCGTCCTCACCGTCCTGCACCAGGACTGGCTGAAT
GGCAAGGAGTACAAGTGCAAGGTCTCCAACAAAGCCCTCCCAGCCCCCATCGAGAAAACCATCTCCAAAGCCAAAGG
GCAGCCCCGAGAACCACAGGTGTACACCCTGCCCCCATCCCGGGAGGAGATGACCAAGAACCAGGTCAGCCTGACCT
GCCTGGTCAAAGGCTTCTATCCCAGCGACATCGCCGTGGAGTGGGAGAGCAATGGGCAGCCGGAGAACAACTACAAG
ACCACGCCTCCCGTGCTGGACTCCGACGGCTCCTTCTTCCTCTACAGCAAGCTCACCGTGGACAAGAGCAGGTGGCA
GCAGGGGAACGTCTTCTCATGCTCCGTGATGCATGAGGCTCTGCACAACCACTACACGCAGAAGAGCCTCTCCCTGT
CTCCGGGTAAATGA]
Amino Acid Sequence
[spacer (SEQ ID NO: 87)][pLW023 without spacer (SEQ ID NO: 512)]
(SEQ ID NO: 452)
[QGQSGQ][MMYCGGNEVLCGPRVGSSGGSGGSGGLSGRSDNHGGGSQTVVTQEPSLTVSPGGTVTLTCRSSTGAVT
TSNYANWVQQKPGQAPRGLIGGTNKRAPGTPARFSGSLLGGKAALTLSGVQPEDEAEYYCALWYSNLWVFGGGTKLT
VLGGGGSGGGGSGGGGSEVQLVESGGGLVQPGGSLKLSCAASGFTFNTYAMNWVRQAPGKGLEWVARIRSKYNNYAT
YYADSVKDRFTISRDDSKNTAYLQMNNLKTEDTAVYYCVRHGNFGNSYVSWFAYWGQGTLVTVSSGGGGSQVQLKQS
GPGLVQPSQSLSITCTVSGFSLTNYGVHWVRQSPGKGLEWLGVIWSGGNTDYNTPFTSRLSINKDNSKSQVFFKMNS
LQSQDTAIYYCARALTYYDYEFAYWGQGTLVTVSAASTKGPSVFPLAPSSKSTSGGTAALGCLVKDYFPEPVTVSWN
SGALTSGVHTFPAVLQSSGLYSLSSVVTVPSSSLGTQTYICNVNHKPSNTKVDKKVEPKSCDKTHTCPPCPAPELLG
GPSVFLFPPKPKDTLMISRTPEVTCVVVDVSHEDPEVKFNWYVDGVEVHNAKTKPREEQYQSTYRVVSVLTVLHQDW
LNGKEYKCKVSNKALPAPIEKTISKAKGQPREPQVYTLPPSREEMTKNQVSLTCLVKGFYPSDIAVEWESNGQPENN
YKTTPPVLDSDGSFFLYSKLTVDKSRWQQGNVFSCSVMHEALHNHYTQKSLSLSPGK]
OPP022: LC C225 3954-1204
Nucleotide Sequence
[spacer (SEQ ID NO: 507)][OPP022 without spacer (SEQ ID NO: 509)]
(SEQ ID NO: 449)
[CAAGGCCAGTCTGGCCAG][TGCATCTCACCTCGTGGTTGTCCGGACGGCCCATACGTCATGTACGGCTCGAGCGG
TGGCAGCGGTGGCTCTGGTGGATCCGGTCTGAGCGGCCGTTCCGATAATCATGGCAGTAGCGGTACCCAGATCTTGC
TGACCCAGAGCCCGGTGATTCTGAGCGTGAGCCCGGGCGAACGTGTGAGCTTTAGCTGCCGCGCGAGCCAGAGCATT
GGCACCAACATTCATTGGTATCAGCAGCGCACCAACGGCAGCCCGCGCCTGCTGATTAAATATGCGAGCGAAAGCAT
TAGCGGCATTCCGAGCCGCTTTAGCGGCAGCGGCAGCGGCACCGATTTTACCCTGAGCATTAACAGCGTGGAAAGCG
AAGATATTGCGGATTATTATTGCCAGCAGAACAACAACTGGCCGACCACCTTTGGCGCGGGCACCAAACTGGAACTG
AAACGTACGGTGGCTGCACCATCTGTCTTCATCTTCCCGCCATCTGATGAGCAGTTGAAATCTGGAACTGCCTCTGT
TGTGTGCCTGCTGAATAACTTCTATCCCAGAGAGGCCAAAGTACAGTGGAAGGTGGATAACGCCCTCCAATCGGGTA
ACTCCCAGGAGAGTGTCACAGAGCAGGACAGCAAGGACAGCACCTACAGCCTCAGCAGCACCCTGACGCTGAGCAAA
GCAGACTACGAGAAACACAAAGTCTACGCCTGCGAAGTCACCCATCAGGGCCTGAGCTCGCCCGTCACAAAGAGCTT
CAACAGGGGAGAGTGTTAG]
Amino Acid Sequence
[spacer (SEQ ID NO: 87)][OPP022 without spacer (SEQ ID NO: 508)]
(SEQ ID NO: 450)
[QGQSGQ][CISPRGCPDGPYVMYGSSGGSGGSGGSGLSGRSDNHGSSGTQILLTQSPVILSVSPGERVSFSCRASQ
SIGTNIHWYQQRTNGSPRLLIKYASESISGIPSRFSGSGSGTDFTLSINSVESEDIADYYCQQNNNWPTTFGAGTKL
ELKRTVAAPSVFIFPPSDEQLKSGTASVVCLLNNFYPREAKVQWKVDNALQSGNSQESVTEQDSKDSTYSLSSTLTL
SKADYEKHKVYACEVTHQGLSSPVTKSFNRGEC]
CI012: C225v5N297Q
pLW006: C225v5N297Q
Nucleotide Sequence
(SEQ ID NO: 455)
CAGGTGCAGCTGAAACAGAGCGGCCCGGGCCTGGTGCAGCCGAGCCAGAGCCTGAGCATTACCTGCACCGTGAGCGG
CTTTAGCCTGACCAACTATGGCGTGCATTGGGTGCGCCAGAGCCCGGGCAAAGGCCTGGAATGGCTGGGCGTGATTT
GGAGCGGCGGCAACACCGATTATAACACCCCGTTTACCAGCCGCCTGAGCATTAACAAAGATAACAGCAAAAGCCAG
GTGTTTTTTAAAATGAACAGCCTGCAAAGCCAGGATACCGCGATTTATTATTGCGCGCGCGCGCTGACCTATTATGA
TTATGAATTTGCGTATTGGGGCCAGGGCACCCTGGTGACCGTGAGCGCGGCTAGCACCAAGGGCCCATCGGTCTTCC
CCCTGGCACCCTCCTCCAAGAGCACCTCTGGGGGCACAGCGGCCCTGGGCTGCCTGGTCAAGGACTACTTCCCCGAA
CCGGTGACGGTGTCGTGGAACTCAGGCGCCCTGACCAGCGGCGTGCACACCTTCCCGGCTGTCCTACAGTCCTCAGG
ACTCTACTCCCTCAGCAGCGTGGTGACCGTGCCCTCCAGCAGCTTGGGCACCCAGACCTACATCTGCAACGTGAATC
ACAAGCCCAGCAACACCAAGGTGGACAAGAAAGTTGAGCCCAAATCTTGTGACAAAACTCACACATGCCCACCGTGC
CCAGCACCTGAACTCCTGGGGGGACCGTCAGTCTTCCTCTTCCCCCCAAAACCCAAGGACACCCTCATGATCTCCCG
GACCCCTGAGGTCACATGCGTGGTGGTGGACGTGAGCCACGAAGACCCTGAGGTCAAGTTCAACTGGTACGTGGACG
GCGTGGAGGTGCATAATGCCAAGACAAAGCCGCGGGAGGAGCAGTACCAGAGCACGTACCGTGTGGTCAGCGTCCTC
ACCGTCCTGCACCAGGACTGGCTGAATGGCAAGGAGTACAAGTGCAAGGTCTCCAACAAAGCCCTCCCAGCCCCCAT
CGAGAAAACCATCTCCAAAGCCAAAGGGCAGCCCCGAGAACCACAGGTGTACACCCTGCCCCCATCCCGGGAGGAGA
TGACCAAGAACCAGGTCAGCCTGACCTGCCTGGTCAAAGGCTTCTATCCCAGCGACATCGCCGTGGAGTGGGAGAGC
AATGGGCAGCCGGAGAACAACTACAAGACCACGCCTCCCGTGCTGGACTCCGACGGCTCCTTCTTCCTCTACAGCAA
GCTCACCGTGGACAAGAGCAGGTGGCAGCAGGGGAACGTCTTCTCATGCTCCGTGATGCATGAGGCTCTGCACAACC
ACTACACGCAGAAGAGCCTCTCCCTGTCTCCGGGTAAATGA
Amino Acid Sequence
(SEQ ID NO: 456)
QVQLKQSGPGLVQPSQSLSITCTVSGFSLTNYGVHWVRQSPGKGLEWLGVIWSGGNTDYNTPFTSRLSINKDNSKSQ
VFFKMNSLQSQDTAIYYCARALTYYDYEFAYWGQGTLVTVSAASTKGPSVFPLAPSSKSTSGGTAALGCLVKDYFPE
PVTVSWNSGALTSGVHTFPAVLQSSGLYSLSSVVTVPSSSLGTQTYICNVNHKPSNTKVDKKVEPKSCDKTHTCPPC
PAPELLGGPSVFLFPPKPKDTLMISRTPEVTCVVVDVSHEDPEVKFNWYVDGVEVHNAKTKPREEQYQSTYRVVSVL
TVLHQDWLNGKEYKCKVSNKALPAPIEKTISKAKGQPREPQVYTLPPSREEMTKNQVSLTCLVKGFYPSDIAVEWES
NGQPENNYKTTPPVLDSDGSFFLYSKLTVDKSRWQQGNVFSCSVMHEALHNHYTQKSLSLSPGK*
OPP021: LC C225
Nucleotide Sequence
(SEQ ID NO: 457)
GATATCTTGCTGACCCAGAGCCCGGTGATTCTGAGCGTGAGCCCGGGCGAACGTGTGAGCTTTAGCTGCCGCGCGAG
CCAGAGCATTGGCACCAACATTCATTGGTATCAGCAGCGCACCAACGGCAGCCCGCGCCTGCTGATTAAATATGCGA
GCGAAAGCATTAGCGGCATTCCGAGCCGCTTTAGCGGCAGCGGCAGCGGCACCGATTTTACCCTGAGCATTAACAGC
GTGGAAAGCGAAGATATTGCGGATTATTATTGCCAGCAGAACAACAACTGGCCGACCACCTTTGGCGCGGGCACCAA
ACTGGAAATCAAACGTACGGTGGCTGCACCATCTGTCTTCATCTTCCCGCCATCTGATGAGCAGTTGAAATCTGGAA
CTGCCTCTGTTGTGTGCCTGCTGAATAACTTCTATCCCAGAGAGGCCAAAGTACAGTGGAAGGTGGATAACGCCCTC
CAATCGGGTAACTCCCAGGAGAGTGTCACAGAGCAGGACAGCAAGGACAGCACCTACAGCCTCAGCAGCACCCTGAC
GCTGAGCAAAGCAGACTACGAGAAACACAAAGTCTACGCCTGCGAAGTCACCCATCAGGGCCTGAGCTCGCCCGTCA
CAAAGAGCTTCAACAGGGGAGAGTGTTAG
Amino Acid Sequence
(SEQ ID NO: 458)
DILLTQSPVILSVSPGERVSFSCRASQSIGTNIHWYQQRTNGSPRLLIKYASESISGIPSRFSGSGSGTDFTLSINS
VESEDIADYYCQQNNNWPTTFGAGTKLEIKRTVAAPSVFIFPPSDEQLKSGTASVVCLLNNFYPREAKVQWKVDNAL
QSGNSQESVTEQDSKDSTYSLSSTLTLSKADYEKHKVYACEVTHQGLSSPVTKSFNRGEC*
CI015: C225v5N297Q-CD3LvHv-H-N
pLW057: HC C225v5N297Q-CD3LvHv-H-N
Nucleotide Sequence
(SEQ ID NO: 459)
CAGACCGTGGTCACACAGGAGCCCTCACTGACAGTGAGCCCTGGCGGGACCGTCACACTGACTTGTCGCAGTTCAAC
TGGCGCCGTGACTACCAGCAATTACGCTAACTGGGTCCAGCAGAAACCAGGACAGGCACCACGAGGACTGATCGGAG
GAACTAATAAGAGAGCACCAGGAACCCCTGCAAGGTTCTCCGGATCTCTGCTGGGGGGAAAAGCCGCTCTGACACTG
AGCGGCGTGCAGCCTGAGGACGAAGCTGAGTACTATTGCGCACTGTGGTACTCCAACCTGTGGGTGTTTGGCGGGGG
AACTAAGCTGACCGTCCTGGGAGGAGGAGGAAGCGGAGGAGGAGGGAGCGGAGGAGGAGGATCCGAAGTGCAGCTGG
TCGAGAGCGGAGGAGGACTGGTGCAGCCAGGAGGATCCCTGAAGCTGTCTTGTGCAGCCAGTGGCTTCACCTTCAAC
ACTTACGCAATGAACTGGGTGCGGCAGGCACCTGGGAAGGGACTGGAATGGGTCGCCCGGATCAGATCTAAATACAA
TAACTATGCCACCTACTATGCTGACAGTGTGAAGGATAGGTTCACCATTTCACGCGACGATAGCAAAAACACAGCTT
ATCTGCAGATGAATAACCTGAAGACCGAGGATACAGCAGTGTACTATTGCGTCAGACACGGCAATTTCGGGAACTCT
TACGTGAGTTGGTTTGCCTATTGGGGACAGGGGACACTGGTCACCGTCTCCTCAGGAGGTGGTGGATCCCAGGTGCA
GCTGAAACAGAGCGGCCCGGGCCTGGTGCAGCCGAGCCAGAGCCTGAGCATTACCTGCACCGTGAGCGGCTTTAGCC
TGACCAACTATGGCGTGCATTGGGTGCGCCAGAGCCCGGGCAAAGGCCTGGAATGGCTGGGCGTGATTTGGAGCGGC
GGCAACACCGATTATAACACCCCGTTTACCAGCCGCCTGAGCATTAACAAAGATAACAGCAAAAGCCAGGTGTTTTT
TAAAATGAACAGCCTGCAAAGCCAGGATACCGCGATTTATTATTGCGCGCGCGCGCTGACCTATTATGATTATGAAT
TTGCGTATTGGGGCCAGGGCACCCTGGTGACCGTGAGCGCGGCTAGCACCAAGGGCCCATCGGTCTTCCCCCTGGCA
CCCTCCTCCAAGAGCACCTCTGGGGGCACAGCGGCCCTGGGCTGCCTGGTCAAGGACTACTTCCCCGAACCGGTGAC
GGTGTCGTGGAACTCAGGCGCCCTGACCAGCGGCGTGCACACCTTCCCGGCTGTCCTACAGTCCTCAGGACTCTACT
CCCTCAGCAGCGTGGTGACCGTGCCCTCCAGCAGCTTGGGCACCCAGACCTACATCTGCAACGTGAATCACAAGCCC
AGCAACACCAAGGTGGACAAGAAAGTTGAGCCCAAATCTTGTGACAAAACTCACACATGCCCACCGTGCCCAGCACC
TGAACTCCTGGGGGGACCGTCAGTCTTCCTCTTCCCCCCAAAACCCAAGGACACCCTCATGATCTCCCGGACCCCTG
AGGTCACATGCGTGGTGGTGGACGTGAGCCACGAAGACCCTGAGGTCAAGTTCAACTGGTACGTGGACGGCGTGGAG
GTGCATAATGCCAAGACAAAGCCGCGGGAGGAGCAGTACCAGAGCACGTACCGTGTGGTCAGCGTCCTCACCGTCCT
GCACCAGGACTGGCTGAATGGCAAGGAGTACAAGTGCAAGGTCTCCAACAAAGCCCTCCCAGCCCCCATCGAGAAAA
CCATCTCCAAAGCCAAAGGGCAGCCCCGAGAACCACAGGTGTACACCCTGCCCCCATCCCGGGAGGAGATGACCAAG
AACCAGGTCAGCCTGACCTGCCTGGTCAAAGGCTTCTATCCCAGCGACATCGCCGTGGAGTGGGAGAGCAATGGGCA
GCCGGAGAACAACTACAAGACCACGCCTCCCGTGCTGGACTCCGACGGCTCCTTCTTCCTCTACAGCAAGCTCACCG
TGGACAAGAGCAGGTGGCAGCAGGGGAACGTCTTCTCATGCTCCGTGATGCATGAGGCTCTGCACAACCACTACACG
CAGAAGAGCCTCTCCCTGTCTCCGGGTAAATGA
Amino Acid Sequence
(SEQ ID NO: 460)
QTVVTQEPSLTVSPGGTVTLTCRSSTGAVTTSNYANWVQQKPGQAPRGLIGGTNKRAPGTPARFSGSLLGGKAALTL
SGVQPEDEAEYYCALWYSNLWVFGGGTKLTVLGGGGSGGGGSGGGGSEVQLVESGGGLVQPGGSLKLSCAASGFTFN
TYAMNWVRQAPGKGLEWVARIRSKYNNYATYYADSVKDRFTISRDDSKNTAYLQMNNLKTEDTAVYYCVRHGNFGNS
YVSWFAYWGQGTLVTVSSGGGGSQVQLKQSGPGLVQPSQSLSITCTVSGFSLTNYGVHWVRQSPGKGLEWLGVIWSG
GNTDYNTPFTSRLSINKDNSKSQVFFKMNSLQSQDTAIYYCARALTYYDYEFAYWGQGTLVTVSAASTKGPSVFPLA
PSSKSTSGGTAALGCLVKDYFPEPVTVSWNSGALTSGVHTFPAVLQSSGLYSLSSVVTVPSSSLGTQTYICNVNHKP
SNTKVDKKVEPKSCDKTHTCPPCPAPELLGGPSVFLFPPKPKDTLMISRTPEVTCVVVDVSHEDPEVKFNWYVDGVE
VHNAKTKPREEQYQSTYRVVSVLTVLHQDWLNGKEYKCKVSNKALPAPIEKTISKAKGQPREPQVYTLPPSREEMTK
NQVSLTCLVKGFYPSDIAVEWESNGQPENNYKTTPPVLDSDGSFFLYSKLTVDKSRWQQGNVFSCSVMHEALHNHYT
QKSLSLSPGK*
OPP021: LC C225
Nucleotide Sequence
(SEQ ID NO: 457)
GATATCTTGCTGACCCAGAGCCCGGTGATTCTGAGCGTGAGCCCGGGCGAACGTGTGAGCTTTAGCTGCCGCGCGAG
CCAGAGCATTGGCACCAACATTCATTGGTATCAGCAGCGCACCAACGGCAGCCCGCGCCTGCTGATTAAATATGCGA
GCGAAAGCATTAGCGGCATTCCGAGCCGCTTTAGCGGCAGCGGCAGCGGCACCGATTTTACCCTGAGCATTAACAGC
GTGGAAAGCGAAGATATTGCGGATTATTATTGCCAGCAGAACAACAACTGGCCGACCACCTTTGGCGCGGGCACCAA
ACTGGAAATCAAACGTACGGTGGCTGCACCATCTGTCTTCATCTTCCCGCCATCTGATGAGCAGTTGAAATCTGGAA
CTGCCTCTGTTGTGTGCCTGCTGAATAACTTCTATCCCAGAGAGGCCAAAGTACAGTGGAAGGTGGATAACGCCCTC
CAATCGGGTAACTCCCAGGAGAGTGTCACAGAGCAGGACAGCAAGGACAGCACCTACAGCCTCAGCAGCACCCTGAC
GCTGAGCAAAGCAGACTACGAGAAACACAAAGTCTACGCCTGCGAAGTCACCCATCAGGGCCTGAGCTCGCCCGTCA
CAAAGAGCTTCAACAGGGGAGAGTGTTAG
Amino Acid Sequence
(SEQ ID NO: 458)
DILLTQSPVILSVSPGERVSFSCRASQSIGTNIHWYQQRTNGSPRLLIKYASESISGIPSRFSGSGSGTDFTLSINS
VESEDIADYYCQQNNNWPTTFGAGTKLEIKRTVAAPSVFIFPPSDEQLKSGTASVVCLLNNFYPREAKVQWKVDNAL
QSGNSQESVTEQDSKDSTYSLSSTLTLSKADYEKHKVYACEVTHQGLSSPVTKSFNRGEC*
CI016: 3954-1204-C225v5N297Q-CD3LvHv-H-N
pLW057: HC C225v5N297Q-CD3LvHv-H-N
Nucleotide Sequence
(SEQ ID NO: 459)
CAGACCGTGGTCACACAGGAGCCCTCACTGACAGTGAGCCCTGGCGGGACCGTCACACTGACTTGTCGCAGTTCAAC
TGGCGCCGTGACTACCAGCAATTACGCTAACTGGGTCCAGCAGAAACCAGGACAGGCACCACGAGGACTGATCGGAG
GAACTAATAAGAGAGCACCAGGAACCCCTGCAAGGTTCTCCGGATCTCTGCTGGGGGGAAAAGCCGCTCTGACACTG
AGCGGCGTGCAGCCTGAGGACGAAGCTGAGTACTATTGCGCACTGTGGTACTCCAACCTGTGGGTGTTTGGCGGGGG
AACTAAGCTGACCGTCCTGGGAGGAGGAGGAAGCGGAGGAGGAGGGAGCGGAGGAGGAGGATCCGAAGTGCAGCTGG
TCGAGAGCGGAGGAGGACTGGTGCAGCCAGGAGGATCCCTGAAGCTGTCTTGTGCAGCCAGTGGCTTCACCTTCAAC
ACTTACGCAATGAACTGGGTGCGGCAGGCACCTGGGAAGGGACTGGAATGGGTCGCCCGGATCAGATCTAAATACAA
TAACTATGCCACCTACTATGCTGACAGTGTGAAGGATAGGTTCACCATTTCACGCGACGATAGCAAAAACACAGCTT
ATCTGCAGATGAATAACCTGAAGACCGAGGATACAGCAGTGTACTATTGCGTCAGACACGGCAATTTCGGGAACTCT
TACGTGAGTTGGTTTGCCTATTGGGGACAGGGGACACTGGTCACCGTCTCCTCAGGAGGTGGTGGATCCCAGGTGCA
GCTGAAACAGAGCGGCCCGGGCCTGGTGCAGCCGAGCCAGAGCCTGAGCATTACCTGCACCGTGAGCGGCTTTAGCC
TGACCAACTATGGCGTGCATTGGGTGCGCCAGAGCCCGGGCAAAGGCCTGGAATGGCTGGGCGTGATTTGGAGCGGC
GGCAACACCGATTATAACACCCCGTTTACCAGCCGCCTGAGCATTAACAAAGATAACAGCAAAAGCCAGGTGTTTTT
TAAAATGAACAGCCTGCAAAGCCAGGATACCGCGATTTATTATTGCGCGCGCGCGCTGACCTATTATGATTATGAAT
TTGCGTATTGGGGCCAGGGCACCCTGGTGACCGTGAGCGCGGCTAGCACCAAGGGCCCATCGGTCTTCCCCCTGGCA
CCCTCCTCCAAGAGCACCTCTGGGGGCACAGCGGCCCTGGGCTGCCTGGTCAAGGACTACTTCCCCGAACCGGTGAC
GGTGTCGTGGAACTCAGGCGCCCTGACCAGCGGCGTGCACACCTTCCCGGCTGTCCTACAGTCCTCAGGACTCTACT
CCCTCAGCAGCGTGGTGACCGTGCCCTCCAGCAGCTTGGGCACCCAGACCTACATCTGCAACGTGAATCACAAGCCC
AGCAACACCAAGGTGGACAAGAAAGTTGAGCCCAAATCTTGTGACAAAACTCACACATGCCCACCGTGCCCAGCACC
TGAACTCCTGGGGGGACCGTCAGTCTTCCTCTTCCCCCCAAAACCCAAGGACACCCTCATGATCTCCCGGACCCCTG
AGGTCACATGCGTGGTGGTGGACGTGAGCCACGAAGACCCTGAGGTCAAGTTCAACTGGTACGTGGACGGCGTGGAG
GTGCATAATGCCAAGACAAAGCCGCGGGAGGAGCAGTACCAGAGCACGTACCGTGTGGTCAGCGTCCTCACCGTCCT
GCACCAGGACTGGCTGAATGGCAAGGAGTACAAGTGCAAGGTCTCCAACAAAGCCCTCCCAGCCCCCATCGAGAAAA
CCATCTCCAAAGCCAAAGGGCAGCCCCGAGAACCACAGGTGTACACCCTGCCCCCATCCCGGGAGGAGATGACCAAG
AACCAGGTCAGCCTGACCTGCCTGGTCAAAGGCTTCTATCCCAGCGACATCGCCGTGGAGTGGGAGAGCAATGGGCA
GCCGGAGAACAACTACAAGACCACGCCTCCCGTGCTGGACTCCGACGGCTCCTTCTTCCTCTACAGCAAGCTCACCG
TGGACAAGAGCAGGTGGCAGCAGGGGAACGTCTTCTCATGCTCCGTGATGCATGAGGCTCTGCACAACCACTACACG
CAGAAGAGCCTCTCCCTGTCTCCGGGTAAATGA
Amino Acid Sequence
(SEQ ID NO: 460)
QTVVTQEPSLTVSPGGTVTLTCRSSTGAVTTSNYANWVQQKPGQAPRGLIGGTNKRAPGTPARFSGSLLGGKAALTL
SGVQPEDEAEYYCALWYSNLWVFGGGTKLTVLGGGGSGGGGSGGGGSEVQLVESGGGLVQPGGSLKLSCAASGFTFN
TYAMNWVRQAPGKGLEWVARIRSKYNNYATYYADSVKDRFTISRDDSKNTAYLQMNNLKTEDTAVYYCVRHGNFGNS
YVSWFAYWGQGTLVTVSSGGGGSQVQLKQSGPGLVQPSQSLSITCTVSGFSLTNYGVHWVRQSPGKGLEWLGVIWSG
GNTDYNTPFTSRLSINKDNSKSQVFFKMNSLQSQDTAIYYCARALTYYDYEFAYWGQGTLVTVSAASTKGPSVFPLA
PSSKSTSGGTAALGCLVKDYFPEPVTVSWNSGALTSGVHTFPAVLQSSGLYSLSSVVTVPSSSLGTQTYICNVNHKP
SNTKVDKKVEPKSCDKTHTCPPCPAPELLGGPSVFLFPPKPKDTLMISRTPEVTCVVVDVSHEDPEVKFNWYVDGVE
VHNAKTKPREEQYQSTYRVVSVLTVLHQDWLNGKEYKCKVSNKALPAPIEKTISKAKGQPREPQVYTLPPSREEMTK
NQVSLTCLVKGFYPSDIAVEWESNGQPENNYKTTPPVLDSDGSFFLYSKLTVDKSRWQQGNVFSCSVMHEALHNHYT
QKSLSLSPGK*
OPP022: LC C225 3954-1204
Nucleotide Sequence
[spacer (SEQ ID NO: 507)][OPP022 without spacer (SEQ ID NO: 509)]
(SEQ ID NO: 449)
[CAAGGCCAGTCTGGCCAG][TGCATCTCACCTCGTGGTTGTCCGGACGGCCCATACGTCATGTACGGCTCGAGCGG
TGGCAGCGGTGGCTCTGGTGGATCCGGTCTGAGCGGCCGTTCCGATAATCATGGCAGTAGCGGTACCCAGATCTTGC
TGACCCAGAGCCCGGTGATTCTGAGCGTGAGCCCGGGCGAACGTGTGAGCTTTAGCTGCCGCGCGAGCCAGAGCATT
GGCACCAACATTCATTGGTATCAGCAGCGCACCAACGGCAGCCCGCGCCTGCTGATTAAATATGCGAGCGAAAGCAT
TAGCGGCATTCCGAGCCGCTTTAGCGGCAGCGGCAGCGGCACCGATTTTACCCTGAGCATTAACAGCGTGGAAAGCG
AAGATATTGCGGATTATTATTGCCAGCAGAACAACAACTGGCCGACCACCTTTGGCGCGGGCACCAAACTGGAACTG
AAACGTACGGTGGCTGCACCATCTGTCTTCATCTTCCCGCCATCTGATGAGCAGTTGAAATCTGGAACTGCCTCTGT
TGTGTGCCTGCTGAATAACTTCTATCCCAGAGAGGCCAAAGTACAGTGGAAGGTGGATAACGCCCTCCAATCGGGTA
ACTCCCAGGAGAGTGTCACAGAGCAGGACAGCAAGGACAGCACCTACAGCCTCAGCAGCACCCTGACGCTGAGCAAA
GCAGACTACGAGAAACACAAAGTCTACGCCTGCGAAGTCACCCATCAGGGCCTGAGCTCGCCCGTCACAAAGAGCTT
CAACAGGGGAGAGTGTTAG]
Amino Acid Sequence
[spacer (SEQ ID NO: 87)][OPP022 without spacer (SEQ ID NO: 508)]
(SEQ ID NO: 450)
[QGQSGQ][CISPRGCPDGPYVMYGSSGGSGGSGGSGLSGRSDNHGSSGTQILLTQSPVILSVSPGERVSFSCRASQ
SIGTNIHWYQQRTNGSPRLLIKYASESISGIPSRFSGSGSGTDFTLSINSVESEDIADYYCQQNNNWPTTFGAGTKL
ELKRTVAAPSVFIFPPSDEQLKSGTASVVCLLNNFYPREAKVQWKVDNALQSGNSQESVTEQDSKDSTYSLSSTLTL
SKADYEKHKVYACEVTHQGLSSPVTKSFNRGEC]*
CI025: IL6RN297Q
pLW078: HC IL6RN297Q
Nucleotide Sequence
(SEQ ID NO: 465)
CAGGTGCAGCTGCAGGAGTCCGGACCAGGACTGGTCCGGCCCTCACAGACTCTGAGCCTGACATGCACTGTGTCAGG
CTACAGCATCACCTCCGATCACGCCTGGAGCTGGGTCAGGCAGCCACCTGGACGCGGCCTGGAATGGATCGGCTACA
TTTCTTATAGTGGGATCACCACATACAACCCCTCTCTGAAGAGTCGAGTGACCATTTCCAGAGACAACTCTAAAAAT
ACACTGTATCTGCAGATGAATAGTCTGCGGGCCGAGGATACAGCTGTGTACTATTGTGCACGGTCTCTGGCCAGAAC
TACCGCTATGGACTATTGGGGGCAGGGAAGCCTGGTGACCGTCAGCTCCGCTAGCACCAAGGGCCCATCGGTCTTCC
CCCTGGCACCCTCCTCCAAGAGCACCTCTGGGGGCACAGCGGCCCTGGGCTGCCTGGTCAAGGACTACTTCCCCGAA
CCGGTGACGGTGTCGTGGAACTCAGGCGCCCTGACCAGCGGCGTGCACACCTTCCCGGCTGTCCTACAGTCCTCAGG
ACTCTACTCCCTCAGCAGCGTGGTGACCGTGCCCTCCAGCAGCTTGGGCACCCAGACCTACATCTGCAACGTGAATC
ACAAGCCCAGCAACACCAAGGTGGACAAGAAAGTTGAGCCCAAATCTTGTGACAAAACTCACACATGCCCACCGTGC
CCAGCACCTGAACTCCTGGGGGGACCGTCAGTCTTCCTCTTCCCCCCAAAACCCAAGGACACCCTCATGATCTCCCG
GACCCCTGAGGTCACATGCGTGGTGGTGGACGTGAGCCACGAAGACCCTGAGGTCAAGTTCAACTGGTACGTGGACG
GCGTGGAGGTGCATAATGCCAAGACAAAGCCGCGGGAGGAGCAGTACCAGAGCACGTACCGTGTGGTCAGCGTCCTC
ACCGTCCTGCACCAGGACTGGCTGAATGGCAAGGAGTACAAGTGCAAGGTCTCCAACAAAGCCCTCCCAGCCCCCAT
CGAGAAAACCATCTCCAAAGCCAAAGGGCAGCCCCGAGAACCACAGGTGTACACCCTGCCCCCATCCCGGGAGGAGA
TGACCAAGAACCAGGTCAGCCTGACCTGCCTGGTCAAAGGCTTCTATCCCAGCGACATCGCCGTGGAGTGGGAGAGC
AATGGGCAGCCGGAGAACAACTACAAGACCACGCCTCCCGTGCTGGACTCCGACGGCTCCTTCTTCCTCTACAGCAA
GCTCACCGTGGACAAGAGCAGGTGGCAGCAGGGGAACGTCTTCTCATGCTCCGTGATGCATGAGGCTCTGCACAACC
ACTACACGCAGAAGAGCCTCTCCCTGTCTCCGGGTAAATGA
Amino Acid Sequence
(SEQ ID NO: 466)
QVQLQESGPGLVRPSQTLSLTCTVSGYSITSDHAWSWVRQPPGRGLEWIGYISYSGITTYNPSLKSRVTISRDNSKN
TLYLQMNSLRAEDTAVYYCARSLARTTAMDYWGQGSLVTVSSASTKGPSVFPLAPSSKSTSGGTAALGCLVKDYFPE
PVTVSWNSGALTSGVHTFPAVLQSSGLYSLSSVVTVPSSSLGTQTYICNVNHKPSNTKVDKKVEPKSCDKTHTCPPC
PAPELLGGPSVFLFPPKPKDTLMISRTPEVTCVVVDVSHEDPEVKFNWYVDGVEVHNAKTKPREEQYQSTYRVVSVL
TVLHQDWLNGKEYKCKVSNKALPAPIEKTISKAKGQPREPQVYTLPPSREEMTKNQVSLTCLVKGFYPSDIAVEWES
NGQPENNYKTTPPVLDSDGSFFLYSKLTVDKSRWQQGNVFSCSVMHEALHNHYTQKSLSLSPGK*
pLW077: LC IL6R
Nucleotide Sequence
(SEQ ID NO: 467)
GACATCCAGATGACTCAGTCTCCTAGCTCCCTGTCCGCCTCTGTGGGGGACCGAGTCACCATCACATGCAGAGCCAG
CCAGGATATTTCTAGTTACCTGAACTGGTATCAGCAGAAGCCCGGAAAAGCACCTAAGCTGCTGATCTACTATACCT
CCAGGCTGCACTCTGGCGTGCCCAGTCGGTTCAGTGGCTCAGGGAGCGGAACCGACTTCACTTTTACCATCTCAAGC
CTGCAGCCAGAGGATATTGCCACATACTATTGTCAGCAGGGCAATACACTGCCCTACACTTTTGGCCAGGGGACCAA
GGTGGAAATCAAACGTACGGTGGCTGCACCATCTGTCTTCATCTTCCCGCCATCTGATGAGCAGTTGAAATCTGGAA
CTGCCTCTGTTGTGTGCCTGCTGAATAACTTCTATCCCAGAGAGGCCAAAGTACAGTGGAAGGTGGATAACGCCCTC
CAATCGGGTAACTCCCAGGAGAGTGTCACAGAGCAGGACAGCAAGGACAGCACCTACAGCCTCAGCAGCACCCTGAC
GCTGAGCAAAGCAGACTACGAGAAACACAAAGTCTACGCCTGCGAAGTCACCCATCAGGGCCTGAGCTCGCCCGTCA
CAAAGAGCTTCAACAGGGGAGAGTGTTAG
Amino Acid Sequence
(SEQ ID NO: 468)
[sequence omitted]
CI026: IL6RN297Q-CD3LvHv-H-N
pLW083: HC IL6RN297Q-CD3LvHv-H-N
Nucleotide Sequence
(SEQ ID NO: 469)
CAGACCGTGGTCACACAGGAGCCCTCACTGACAGTGAGCCCTGGCGGGACCGTCACACTGACTTGTCGCAGTTCAAC
TGGCGCCGTGACTACCAGCAATTACGCTAACTGGGTCCAGCAGAAACCAGGACAGGCACCACGAGGACTGATCGGAG
GAACTAATAAGAGAGCACCAGGAACCCCTGCAAGGTTCTCCGGATCTCTGCTGGGGGGAAAAGCCGCTCTGACACTG
AGCGGCGTGCAGCCTGAGGACGAAGCTGAGTACTATTGCGCACTGTGGTACTCCAACCTGTGGGTGTTTGGCGGGGG
AACTAAGCTGACCGTCCTGGGAGGAGGAGGAAGCGGAGGAGGAGGGAGCGGAGGAGGAGGATCCGAAGTGCAGCTGG
TCGAGAGCGGAGGAGGACTGGTGCAGCCAGGAGGATCCCTGAAGCTGTCTTGTGCAGCCAGTGGCTTCACCTTCAAC
ACTTACGCAATGAACTGGGTGCGGCAGGCACCTGGGAAGGGACTGGAATGGGTCGCCCGGATCAGATCTAAATACAA
TAACTATGCCACCTACTATGCTGACAGTGTGAAGGATAGGTTCACCATTTCACGCGACGATAGCAAAAACACAGCTT
ATCTGCAGATGAATAACCTGAAGACCGAGGATACAGCAGTGTACTATTGCGTCAGACACGGCAATTTCGGGAACTCT
TACGTGAGTTGGTTTGCCTATTGGGGACAGGGGACACTGGTCACCGTCTCCTCAGGAGGTGGTGGATCCCAGGTGCA
GCTGCAGGAGTCCGGACCAGGACTGGTCCGGCCCTCACAGACTCTGAGCCTGACATGCACTGTGTCAGGCTACAGCA
TCACCTCCGATCACGCCTGGAGCTGGGTCAGGCAGCCACCTGGACGCGGCCTGGAATGGATCGGCTACATTTCTTAT
AGTGGGATCACCACATACAACCCCTCTCTGAAGAGTCGAGTGACCATTTCCAGAGACAACTCTAAAAATACACTGTA
TCTGCAGATGAATAGTCTGCGGGCCGAGGATACAGCTGTGTACTATTGTGCACGGTCTCTGGCCAGAACTACCGCTA
TGGACTATTGGGGGCAGGGAAGCCTGGTGACCGTCAGCTCCGCTAGCACCAAGGGCCCATCGGTCTTCCCCCTGGCA
CCCTCCTCCAAGAGCACCTCTGGGGGCACAGCGGCCCTGGGCTGCCTGGTCAAGGACTACTTCCCCGAACCGGTGAC
GGTGTCGTGGAACTCAGGCGCCCTGACCAGCGGCGTGCACACCTTCCCGGCTGTCCTACAGTCCTCAGGACTCTACT
CCCTCAGCAGCGTGGTGACCGTGCCCTCCAGCAGCTTGGGCACCCAGACCTACATCTGCAACGTGAATCACAAGCCC
AGCAACACCAAGGTGGACAAGAAAGTTGAGCCCAAATCTTGTGACAAAACTCACACATGCCCACCGTGCCCAGCACC
TGAACTCCTGGGGGGACCGTCAGTCTTCCTCTTCCCCCCAAAACCCAAGGACACCCTCATGATCTCCCGGACCCCTG
AGGTCACATGCGTGGTGGTGGACGTGAGCCACGAAGACCCTGAGGTCAAGTTCAACTGGTACGTGGACGGCGTGGAG
GTGCATAATGCCAAGACAAAGCCGCGGGAGGAGCAGTACCAGAGCACGTACCGTGTGGTCAGCGTCCTCACCGTCCT
GCACCAGGACTGGCTGAATGGCAAGGAGTACAAGTGCAAGGTCTCCAACAAAGCCCTCCCAGCCCCCATCGAGAAAA
CCATCTCCAAAGCCAAAGGGCAGCCCCGAGAACCACAGGTGTACACCCTGCCCCCATCCCGGGAGGAGATGACCAAG
AACCAGGTCAGCCTGACCTGCCTGGTCAAAGGCTTCTATCCCAGCGACATCGCCGTGGAGTGGGAGAGCAATGGGCA
GCCGGAGAACAACTACAAGACCACGCCTCCCGTGCTGGACTCCGACGGCTCCTTCTTCCTCTACAGCAAGCTCACCG
TGGACAAGAGCAGGTGGCAGCAGGGGAACGTCTTCTCATGCTCCGTGATGCATGAGGCTCTGCACAACCACTACACG
CAGAAGAGCCTCTCCCTGTCTCCGGGTAAATGA
Amino Acid Sequence
(SEQ ID NO: 470)
QTVVTQEPSLTVSPGGTVTLTCRSSTGAVTTSNYANWVQQKPGQAPRGLIGGTNKRAPGTPARFSGSLLGGKAALTL
SGVQPEDEAEYYCALWYSNLWVFGGGTKLTVLGGGGSGGGGSGGGGSEVQLVESGGGLVQPGGSLKLSCAASGFTFN
TYAMNWVRQAPGKGLEWVARIRSKYNNYATYYADSVKDRFTISRDDSKNTAYLQMNNLKTEDTAVYYCVRHGNFGNS
YVSWFAYWGQGTLVTVSSGGGGSQVQLQESGPGLVRPSQTLSLTCTVSGYSITSDHAWSWVRQPPGRGLEWIGYISY
SGITTYNPSLKSRVTISRDNSKNTLYLQMNSLRAEDTAVYYCARSLARTTAMDYWGQGSLVTVSSASTKGPSVFPLA
PSSKSTSGGTAALGCLVKDYFPEPVTVSWNSGALTSGVHTFPAVLQSSGLYSLSSVVTVPSSSLGTQTYICNVNHKP
SNTKVDKKVEPKSCDKTHTCPPCPAPELLGGPSVFLFPPKPKDTLMISRTPEVTCVVVDVSHEDPEVKFNWYVDGVE
VHNAKTKPREEQYQSTYRVVSVLTVLHQDWLNGKEYKCKVSNKALPAPIEKTISKAKGQPREPQVYTLPPSREEMTK
NQVSLTCLVKGFYPSDIAVEWESNGQPENNYKTTPPVLDSDGSFFLYSKLTVDKSRWQQGNVFSCSVMHEALHNHYT
QKSLSLSPGK*
pLW077: LC IL6R
Nucleotide Sequence
(SEQ ID NO: 467)
GACATCCAGATGACTCAGTCTCCTAGCTCCCTGTCCGCCTCTGTGGGGGACCGAGTCACCATCACATGCAGAGCCAG
CCAGGATATTTCTAGTTACCTGAACTGGTATCAGCAGAAGCCCGGAAAAGCACCTAAGCTGCTGATCTACTATACCT
CCAGGCTGCACTCTGGCGTGCCCAGTCGGTTCAGTGGCTCAGGGAGCGGAACCGACTTCACTTTTACCATCTCAAGC
CTGCAGCCAGAGGATATTGCCACATACTATTGTCAGCAGGGCAATACACTGCCCTACACTTTTGGCCAGGGGACCAA
GGTGGAAATCAAACGTACGGTGGCTGCACCATCTGTCTTCATCTTCCCGCCATCTGATGAGCAGTTGAAATCTGGAA
CTGCCTCTGTTGTGTGCCTGCTGAATAACTTCTATCCCAGAGAGGCCAAAGTACAGTGGAAGGTGGATAACGCCCTC
CAATCGGGTAACTCCCAGGAGAGTGTCACAGAGCAGGACAGCAAGGACAGCACCTACAGCCTCAGCAGCACCCTGAC
GCTGAGCAAAGCAGACTACGAGAAACACAAAGTCTACGCCTGCGAAGTCACCCATCAGGGCCTGAGCTCGCCCGTCA
CAAAGAGCTTCAACAGGGGAGAGTGTTAG
Amino Acid Sequence
(SEQ ID NO: 468)
[sequence omitted]
CI027: IL6RN297Q-15865 1204-CD3LvHv-H-N
pLW085: HC IL6RN297Q-15865_1204-CD3LvHv-H-N
Nucleotide Sequence
[spacer (SEQ ID NO: 507)][pLW085 without spacer (SEQ ID NO: 513)]
(SEQ ID NO: 471)
[CAAGGCCAGTCTGGCCAA][ATGATGTATTGCGGTGGGAATGAGGTGTTGTGCGGGCCGCGGGTTGGCTCGAGCGG
TGGCAGCGGTGGCTCTGGTGGTCTGAGCGGCCGTTCCGATAATCATGGCGGCGGTTCTCAGACCGTGGTCACACAGG
AGCCCTCACTGACAGTGAGCCCTGGCGGGACCGTCACACTGACTTGTCGCAGTTCAACTGGCGCCGTGACTACCAGC
AATTACGCTAACTGGGTCCAGCAGAAACCAGGACAGGCACCACGAGGACTGATCGGAGGAACTAATAAGAGAGCACC
AGGAACCCCTGCAAGGTTCTCCGGATCTCTGCTGGGGGGAAAAGCCGCTCTGACACTGAGCGGCGTGCAGCCTGAGG
ACGAAGCTGAGTACTATTGCGCACTGTGGTACTCCAACCTGTGGGTGTTTGGCGGGGGAACTAAGCTGACCGTCCTG
GGAGGAGGAGGAAGCGGAGGAGGAGGGAGCGGAGGAGGAGGATCCGAAGTGCAGCTGGTCGAGAGCGGAGGAGGACT
GGTGCAGCCAGGAGGATCCCTGAAGCTGTCTTGTGCAGCCAGTGGCTTCACCTTCAACACTTACGCAATGAACTGGG
TGCGGCAGGCACCTGGGAAGGGACTGGAATGGGTCGCCCGGATCAGATCTAAATACAATAACTATGCCACCTACTAT
GCTGACAGTGTGAAGGATAGGTTCACCATTTCACGCGACGATAGCAAAAACACAGCTTATCTGCAGATGAATAACCT
GAAGACCGAGGATACAGCAGTGTACTATTGCGTCAGACACGGCAATTTCGGGAACTCTTACGTGAGTTGGTTTGCCT
ATTGGGGACAGGGGACACTGGTCACCGTCTCCTCAGGAGGTGGTGGATCCCAGGTGCAGCTGCAGGAGTCCGGACCA
GGACTGGTCCGGCCCTCACAGACTCTGAGCCTGACATGCACTGTGTCAGGCTACAGCATCACCTCCGATCACGCCTG
GAGCTGGGTCAGGCAGCCACCTGGACGCGGCCTGGAATGGATCGGCTACATTTCTTATAGTGGGATCACCACATACA
ACCCCTCTCTGAAGAGTCGAGTGACCATTTCCAGAGACAACTCTAAAAATACACTGTATCTGCAGATGAATAGTCTG
CGGGCCGAGGATACAGCTGTGTACTATTGTGCACGGTCTCTGGCCAGAACTACCGCTATGGACTATTGGGGGCAGGG
AAGCCTGGTGACCGTCAGCTCCGCTAGCACCAAGGGCCCATCGGTCTTCCCCCTGGCACCCTCCTCCAAGAGCACCT
CTGGGGGCACAGCGGCCCTGGGCTGCCTGGTCAAGGACTACTTCCCCGAACCGGTGACGGTGTCGTGGAACTCAGGC
GCCCTGACCAGCGGCGTGCACACCTTCCCGGCTGTCCTACAGTCCTCAGGACTCTACTCCCTCAGCAGCGTGGTGAC
CGTGCCCTCCAGCAGCTTGGGCACCCAGACCTACATCTGCAACGTGAATCACAAGCCCAGCAACACCAAGGTGGACA
AGAAAGTTGAGCCCAAATCTTGTGACAAAACTCACACATGCCCACCGTGCCCAGCACCTGAACTCCTGGGGGGACCG
TCAGTCTTCCTCTTCCCCCCAAAACCCAAGGACACCCTCATGATCTCCCGGACCCCTGAGGTCACATGCGTGGTGGT
GGACGTGAGCCACGAAGACCCTGAGGTCAAGTTCAACTGGTACGTGGACGGCGTGGAGGTGCATAATGCCAAGACAA
AGCCGCGGGAGGAGCAGTACCAGAGCACGTACCGTGTGGTCAGCGTCCTCACCGTCCTGCACCAGGACTGGCTGAAT
GGCAAGGAGTACAAGTGCAAGGTCTCCAACAAAGCCCTCCCAGCCCCCATCGAGAAAACCATCTCCAAAGCCAAAGG
GCAGCCCCGAGAACCACAGGTGTACACCCTGCCCCCATCCCGGGAGGAGATGACCAAGAACCAGGTCAGCCTGACCT
GCCTGGTCAAAGGCTTCTATCCCAGCGACATCGCCGTGGAGTGGGAGAGCAATGGGCAGCCGGAGAACAACTACAAG
ACCACGCCTCCCGTGCTGGACTCCGACGGCTCCTTCTTCCTCTACAGCAAGCTCACCGTGGACAAGAGCAGGTGGCA
GCAGGGGAACGTCTTCTCATGCTCCGTGATGCATGAGGCTCTGCACAACCACTACACGCAGAAGAGCCTCTCCCTGT
CTCCGGGTAAATGA]
Amino Acid Sequence
[spacer (SEQ ID NO: 87)][pLW085 without spacer (SEQ ID NO: 514)]
(SEQ ID NO: 472)
[QGQSGQ][MMYCGGNEVLCGPRVGSSGGSGGSGGLSGRSDNHGGGSQTVVTQEPSLTVSPGGTVTLTCRSSTGAVT
TSNYANWVQQKPGQAPRGLIGGTNKRAPGTPARFSGSLLGGKAALTLSGVQPEDEAEYYCALWYSNLWVFGGGTKLT
VLGGGGSGGGGSGGGGSEVQLVESGGGLVQPGGSLKLSCAASGFTFNTYAMNWVRQAPGKGLEWVARIRSKYNNYAT
YYADSVKDRFTISRDDSKNTAYLQMNNLKTEDTAVYYCVRHGNFGNSYVSWFAYWGQGTLVTVSSGGGGSQVQLQES
GPGLVRPSQTLSLTCTVSGYSITSDHAWSWVRQPPGRGLEWIGYISYSGITTYNPSLKSRVTISRDNSKNTLYLQMN
SLRAEDTAVYYCARSLARTTAMDYWGQGSLVTVSSASTKGPSVFPLAPSSKSTSGGTAALGCLVKDYFPEPVTVSWN
SGALTSGVHTFPAVLQSSGLYSLSSVVTVPSSSLGTQTYICNVNHKPSNTKVDKKVEPKSCDKTHTCPPCPAPELLG
GPSVFLFPPKPKDTLMISRTPEVTCVVVDVSHEDPEVKFNWYVDGVEVHNAKTKPREEQYQSTYRVVSVLTVLHQDW
LNGKEYKCKVSNKALPAPIEKTISKAKGQPREPQVYTLPPSREEMTKNQVSLTCLVKGFYPSDIAVEWESNGQPENN
YKTTPPVLDSDGSFFLYSKLTVDKSRWQQGNVFSCSVMHEALHNHYTQKSLSLSPGK]*
pLW077: LC IL6R
Nucleotide Sequence
(SEQ ID NO: 467)
GACATCCAGATGACTCAGTCTCCTAGCTCCCTGTCCGCCTCTGTGGGGGACCGAGTCACCATCACATGCAGAGCCAG
CCAGGATATTTCTAGTTACCTGAACTGGTATCAGCAGAAGCCCGGAAAAGCACCTAAGCTGCTGATCTACTATACCT
CCAGGCTGCACTCTGGCGTGCCCAGTCGGTTCAGTGGCTCAGGGAGCGGAACCGACTTCACTTTTACCATCTCAAGC
CTGCAGCCAGAGGATATTGCCACATACTATTGTCAGCAGGGCAATACACTGCCCTACACTTTTGGCCAGGGGACCAA
GGTGGAAATCAAACGTACGGTGGCTGCACCATCTGTCTTCATCTTCCCGCCATCTGATGAGCAGTTGAAATCTGGAA
CTGCCTCTGTTGTGTGCCTGCTGAATAACTTCTATCCCAGAGAGGCCAAAGTACAGTGGAAGGTGGATAACGCCCTC
CAATCGGGTAACTCCCAGGAGAGTGTCACAGAGCAGGACAGCAAGGACAGCACCTACAGCCTCAGCAGCACCCTGAC
GCTGAGCAAAGCAGACTACGAGAAACACAAAGTCTACGCCTGCGAAGTCACCCATCAGGGCCTGAGCTCGCCCGTCA
CAAAGAGCTTCAACAGGGGAGAGTGTTAG
Amino Acid Sequence
(SEQ ID NO: 468)
[sequence omitted]
CI029: 4792-1204-1L6RN297Q-15865_1204-CD3LvHv-H-N
pLW085: HC IL6RN297Q-15865_1204-CD3LvHv-H-N
Nucleotide Sequence
[spacer (SEQ ID NO: 507)][pLW085 without spacer (SEQ ID NO: 513)]
(SEQ ID NO: 471)
[CAAGGCCAGTCTGGCCAA][ATGATGTATTGCGGTGGGAATGAGGTGTTGTGCGGGCCGCGGGTTGGCTCGAGCGG
TGGCAGCGGTGGCTCTGGTGGTCTGAGCGGCCGTTCCGATAATCATGGCGGCGGTTCTCAGACCGTGGTCACACAGG
AGCCCTCACTGACAGTGAGCCCTGGCGGGACCGTCACACTGACTTGTCGCAGTTCAACTGGCGCCGTGACTACCAGC
AATTACGCTAACTGGGTCCAGCAGAAACCAGGACAGGCACCACGAGGACTGATCGGAGGAACTAATAAGAGAGCACC
AGGAACCCCTGCAAGGTTCTCCGGATCTCTGCTGGGGGGAAAAGCCGCTCTGACACTGAGCGGCGTGCAGCCTGAGG
ACGAAGCTGAGTACTATTGCGCACTGTGGTACTCCAACCTGTGGGTGTTTGGCGGGGGAACTAAGCTGACCGTCCTG
GGAGGAGGAGGAAGCGGAGGAGGAGGGAGCGGAGGAGGAGGATCCGAAGTGCAGCTGGTCGAGAGCGGAGGAGGACT
GGTGCAGCCAGGAGGATCCCTGAAGCTGTCTTGTGCAGCCAGTGGCTTCACCTTCAACACTTACGCAATGAACTGGG
TGCGGCAGGCACCTGGGAAGGGACTGGAATGGGTCGCCCGGATCAGATCTAAATACAATAACTATGCCACCTACTAT
GCTGACAGTGTGAAGGATAGGTTCACCATTTCACGCGACGATAGCAAAAACACAGCTTATCTGCAGATGAATAACCT
GAAGACCGAGGATACAGCAGTGTACTATTGCGTCAGACACGGCAATTTCGGGAACTCTTACGTGAGTTGGTTTGCCT
ATTGGGGACAGGGGACACTGGTCACCGTCTCCTCAGGAGGTGGTGGATCCCAGGTGCAGCTGCAGGAGTCCGGACCA
GGACTGGTCCGGCCCTCACAGACTCTGAGCCTGACATGCACTGTGTCAGGCTACAGCATCACCTCCGATCACGCCTG
GAGCTGGGTCAGGCAGCCACCTGGACGCGGCCTGGAATGGATCGGCTACATTTCTTATAGTGGGATCACCACATACA
ACCCCTCTCTGAAGAGTCGAGTGACCATTTCCAGAGACAACTCTAAAAATACACTGTATCTGCAGATGAATAGTCTG
CGGGCCGAGGATACAGCTGTGTACTATTGTGCACGGTCTCTGGCCAGAACTACCGCTATGGACTATTGGGGGCAGGG
AAGCCTGGTGACCGTCAGCTCCGCTAGCACCAAGGGCCCATCGGTCTTCCCCCTGGCACCCTCCTCCAAGAGCACCT
CTGGGGGCACAGCGGCCCTGGGCTGCCTGGTCAAGGACTACTTCCCCGAACCGGTGACGGTGTCGTGGAACTCAGGC
GCCCTGACCAGCGGCGTGCACACCTTCCCGGCTGTCCTACAGTCCTCAGGACTCTACTCCCTCAGCAGCGTGGTGAC
CGTGCCCTCCAGCAGCTTGGGCACCCAGACCTACATCTGCAACGTGAATCACAAGCCCAGCAACACCAAGGTGGACA
AGAAAGTTGAGCCCAAATCTTGTGACAAAACTCACACATGCCCACCGTGCCCAGCACCTGAACTCCTGGGGGGACCG
TCAGTCTTCCTCTTCCCCCCAAAACCCAAGGACACCCTCATGATCTCCCGGACCCCTGAGGTCACATGCGTGGTGGT
GGACGTGAGCCACGAAGACCCTGAGGTCAAGTTCAACTGGTACGTGGACGGCGTGGAGGTGCATAATGCCAAGACAA
AGCCGCGGGAGGAGCAGTACCAGAGCACGTACCGTGTGGTCAGCGTCCTCACCGTCCTGCACCAGGACTGGCTGAAT
GGCAAGGAGTACAAGTGCAAGGTCTCCAACAAAGCCCTCCCAGCCCCCATCGAGAAAACCATCTCCAAAGCCAAAGG
GCAGCCCCGAGAACCACAGGTGTACACCCTGCCCCCATCCCGGGAGGAGATGACCAAGAACCAGGTCAGCCTGACCT
GCCTGGTCAAAGGCTTCTATCCCAGCGACATCGCCGTGGAGTGGGAGAGCAATGGGCAGCCGGAGAACAACTACAAG
ACCACGCCTCCCGTGCTGGACTCCGACGGCTCCTTCTTCCTCTACAGCAAGCTCACCGTGGACAAGAGCAGGTGGCA
GCAGGGGAACGTCTTCTCATGCTCCGTGATGCATGAGGCTCTGCACAACCACTACACGCAGAAGAGCCTCTCCCTGT
CTCCGGGTAAATGA]
Amino Acid Sequence
[spacer (SEQ ID NO: 87)][pLW085 without spacer (SEQ ID NO: 514)]
(SEQ ID NO: 472)
[QGQSGQ][MMYCGGNEVLCGPRVGSSGGSGGSGGLSGRSDNHGGGSQTVVTQEPSLTVSPGGTVTLTCRSSTGAVT
TSNYANWVQQKPGQAPRGLIGGTNKRAPGTPARFSGSLLGGKAALTLSGVQPEDEAEYYCALWYSNLWVFGGGTKLT
VLGGGGSGGGGSGGGGSEVQLVESGGGLVQPGGSLKLSCAASGFTFNTYAMNWVRQAPGKGLEWVARIRSKYNNYAT
YYADSVKDRFTISRDDSKNTAYLQMNNLKTEDTAVYYCVRHGNFGNSYVSWFAYWGQGTLVTVSSGGGGSQVQLQES
GPGLVRPSQTLSLTCTVSGYSITSDHAWSWVRQPPGRGLEWIGYISYSGITTYNPSLKSRVTISRDNSKNTLYLQMN
SLRAEDTAVYYCARSLARTTAMDYWGQGSLVTVSSASTKGPSVFPLAPSSKSTSGGTAALGCLVKDYFPEPVTVSWN
SGALTSGVHTFPAVLQSSGLYSLSSVVTVPSSSLGTQTYICNVNHKPSNTKVDKKVEPKSCDKTHTCPPCPAPELLG
GPSVFLFPPKPKDTLMISRTPEVTCVVVDVSHEDPEVKFNWYVDGVEVHNAKTKPREEQYQSTYRVVSVLTVLHQDW
LNGKEYKCKVSNKALPAPIEKTISKAKGQPREPQVYTLPPSREEMTKNQVSLTCLVKGFYPSDIAVEWESNGQPENN
YKTTPPVLDSDGSFFLYSKLTVDKSRWQQGNVFSCSVMHEALHNHYTQKSLSLSPGK]*
pLW080: LC IL6R 4792 1204
Nucleotide Sequence
[spacer (SEQ ID NO: 507)][pLW080 without spacer (SEQ ID NO: 515)]
(SEQ ID NO: 473)
[CAAGGCCAGTCTGGCCAG][TATGGGTCCTGCAGTTGGAACTATGTACACATATTCATGGATTGCGGCTCGAGCGG
TGGCAGCGGTGGCTCTGGTGGTCTGAGCGGCCGTTCCGATAATCATGGCGGCGGTTCTGACATCCAGATGACTCAGT
CTCCTAGCTCCCTGTCCGCCTCTGTGGGGGACCGAGTCACCATCACATGCAGAGCCAGCCAGGATATTTCTAGTTAC
CTGAACTGGTATCAGCAGAAGCCCGGAAAAGCACCTAAGCTGCTGATCTACTATACCTCCAGGCTGCACTCTGGCGT
GCCCAGTCGGTTCAGTGGCTCAGGGAGCGGAACCGACTTCACTTTTACCATCTCAAGCCTGCAGCCAGAGGATATTG
CCACATACTATTGTCAGCAGGGCAATACACTGCCCTACACTTTTGGCCAGGGGACCAAGGTGGAAATCAAACGTACG
GTGGCTGCACCATCTGTCTTCATCTTCCCGCCATCTGATGAGCAGTTGAAATCTGGAACTGCCTCTGTTGTGTGCCT
GCTGAATAACTTCTATCCCAGAGAGGCCAAAGTACAGTGGAAGGTGGATAACGCCCTCCAATCGGGTAACTCCCAGG
AGAGTGTCACAGAGCAGGACAGCAAGGACAGCACCTACAGCCTCAGCAGCACCCTGACGCTGAGCAAAGCAGACTAC
GAGAAACACAAAGTCTACGCCTGCGAAGTCACCCATCAGGGCCTGAGCTCGCCCGTCACAAAGAGCTTCAACAGGGG
AGAGTGTTAG]
Amino Acid Sequence
[spacer (SEQ ID NO: 87)][pLW080 without spacer (SEQ ID NO: 516)]
(SEQ ID NO: 474)
[QGQSGQ][YGSCSWNYVHIFMDCGSSGGSGGSGGLSGRSDNHGGGSDIQMTQSPSSLSASVGDRVTITCRASQDIS
SYLNWYQQKPGKAPKLLIYYTSRLHSGVPSRFSGSGSGTDFTFTISSLQPEDIATYYCQQGNTLPYTFGQGTKVEIK
RTVAAPSVFIFPPSDEQLKSGTASVVCLLNNFYPREAKVQWKVDNALQSGNSQESVTEQDSKDSTYSLSSTLTLSKA
DYEKHKVYACEVTHQGLSSPVTKSFNRGEC]*
CI036: 4792-1204-IL6RN297Q-CD3LvHv-H-N
pLW083: HC AV1N297Q-CD3LvHv-H-N
Nucleotide Sequence
(SEQ ID NO: 469)
CAGACCGTGGTCACACAGGAGCCCTCACTGACAGTGAGCCCTGGCGGGACCGTCACACTGACTTGTCGCAGTTCAAC
TGGCGCCGTGACTACCAGCAATTACGCTAACTGGGTCCAGCAGAAACCAGGACAGGCACCACGAGGACTGATCGGAG
GAACTAATAAGAGAGCACCAGGAACCCCTGCAAGGTTCTCCGGATCTCTGCTGGGGGGAAAAGCCGCTCTGACACTG
AGCGGCGTGCAGCCTGAGGACGAAGCTGAGTACTATTGCGCACTGTGGTACTCCAACCTGTGGGTGTTTGGCGGGGG
AACTAAGCTGACCGTCCTGGGAGGAGGAGGAAGCGGAGGAGGAGGGAGCGGAGGAGGAGGATCCGAAGTGCAGCTGG
TCGAGAGCGGAGGAGGACTGGTGCAGCCAGGAGGATCCCTGAAGCTGTCTTGTGCAGCCAGTGGCTTCACCTTCAAC
ACTTACGCAATGAACTGGGTGCGGCAGGCACCTGGGAAGGGACTGGAATGGGTCGCCCGGATCAGATCTAAATACAA
TAACTATGCCACCTACTATGCTGACAGTGTGAAGGATAGGTTCACCATTTCACGCGACGATAGCAAAAACACAGCTT
ATCTGCAGATGAATAACCTGAAGACCGAGGATACAGCAGTGTACTATTGCGTCAGACACGGCAATTTCGGGAACTCT
TACGTGAGTTGGTTTGCCTATTGGGGACAGGGGACACTGGTCACCGTCTCCTCAGGAGGTGGTGGATCCCAGGTGCA
GCTGCAGGAGTCCGGACCAGGACTGGTCCGGCCCTCACAGACTCTGAGCCTGACATGCACTGTGTCAGGCTACAGCA
TCACCTCCGATCACGCCTGGAGCTGGGTCAGGCAGCCACCTGGACGCGGCCTGGAATGGATCGGCTACATTTCTTAT
AGTGGGATCACCACATACAACCCCTCTCTGAAGAGTCGAGTGACCATTTCCAGAGACAACTCTAAAAATACACTGTA
TCTGCAGATGAATAGTCTGCGGGCCGAGGATACAGCTGTGTACTATTGTGCACGGTCTCTGGCCAGAACTACCGCTA
TGGACTATTGGGGGCAGGGAAGCCTGGTGACCGTCAGCTCCGCTAGCACCAAGGGCCCATCGGTCTTCCCCCTGGCA
CCCTCCTCCAAGAGCACCTCTGGGGGCACAGCGGCCCTGGGCTGCCTGGTCAAGGACTACTTCCCCGAACCGGTGAC
GGTGTCGTGGAACTCAGGCGCCCTGACCAGCGGCGTGCACACCTTCCCGGCTGTCCTACAGTCCTCAGGACTCTACT
CCCTCAGCAGCGTGGTGACCGTGCCCTCCAGCAGCTTGGGCACCCAGACCTACATCTGCAACGTGAATCACAAGCCC
AGCAACACCAAGGTGGACAAGAAAGTTGAGCCCAAATCTTGTGACAAAACTCACACATGCCCACCGTGCCCAGCACC
TGAACTCCTGGGGGGACCGTCAGTCTTCCTCTTCCCCCCAAAACCCAAGGACACCCTCATGATCTCCCGGACCCCTG
AGGTCACATGCGTGGTGGTGGACGTGAGCCACGAAGACCCTGAGGTCAAGTTCAACTGGTACGTGGACGGCGTGGAG
GTGCATAATGCCAAGACAAAGCCGCGGGAGGAGCAGTACCAGAGCACGTACCGTGTGGTCAGCGTCCTCACCGTCCT
GCACCAGGACTGGCTGAATGGCAAGGAGTACAAGTGCAAGGTCTCCAACAAAGCCCTCCCAGCCCCCATCGAGAAAA
CCATCTCCAAAGCCAAAGGGCAGCCCCGAGAACCACAGGTGTACACCCTGCCCCCATCCCGGGAGGAGATGACCAAG
AACCAGGTCAGCCTGACCTGCCTGGTCAAAGGCTTCTATCCCAGCGACATCGCCGTGGAGTGGGAGAGCAATGGGCA
GCCGGAGAACAACTACAAGACCACGCCTCCCGTGCTGGACTCCGACGGCTCCTTCTTCCTCTACAGCAAGCTCACCG
TGGACAAGAGCAGGTGGCAGCAGGGGAACGTCTTCTCATGCTCCGTGATGCATGAGGCTCTGCACAACCACTACACG
CAGAAGAGCCTCTCCCTGTCTCCGGGTAAATGA
Amino Acid Sequence
(SEQ ID NO: 470)
QTVVTQEPSLTVSPGGTVTLTCRSSTGAVTTSNYANWVQQKPGQAPRGLIGGTNKRAPGTPARFSGSLLGGKAALTL
SGVQPEDEAEYYCALWYSNLWVFGGGTKLTVLGGGGSGGGGSGGGGSEVQLVESGGGLVQPGGSLKLSCAASGFTFN
TYAMNWVRQAPGKGLEWVARIRSKYNNYATYYADSVKDRFTISRDDSKNTAYLQMNNLKTEDTAVYYCVRHGNFGNS
YVSWFAYWGQGTLVTVSSGGGGSQVQLQESGPGLVRPSQTLSLTCTVSGYSITSDHAWSWVRQPPGRGLEWIGYISY
SGITTYNPSLKSRVTISRDNSKNTLYLQMNSLRAEDTAVYYCARSLARTTAMDYWGQGSLVTVSSASTKGPSVFPLA
PSSKSTSGGTAALGCLVKDYFPEPVTVSWNSGALTSGVHTFPAVLQSSGLYSLSSVVTVPSSSLGTQTYICNVNHKP
SNTKVDKKVEPKSCDKTHTCPPCPAPELLGGPSVFLFPPKPKDTLMISRTPEVTCVVVDVSHEDPEVKFNWYVDGVE
VHNAKTKPREEQYQSTYRVVSVLTVLHQDWLNGKEYKCKVSNKALPAPIEKTISKAKGQPREPQVYTLPPSREEMTK
NQVSLTCLVKGFYPSDIAVEWESNGQPENNYKTTPPVLDSDGSFFLYSKLTVDKSRWQQGNVFSCSVMHEALHNHYT
QKSLSLSPGK*
pLW080: LC IL6R 4792 1204
Nucleotide Sequence
[spacer (SEQ ID NO: 507)][pLW080 without spacer (SEQ ID NO: 515)]
(SEQ ID NO: 473)
[CAAGGCCAGTCTGGCCAG][TATGGGTCCTGCAGTTGGAACTATGTACACATATTCATGGATTGCGGCTCGAGCGG
TGGCAGCGGTGGCTCTGGTGGTCTGAGCGGCCGTTCCGATAATCATGGCGGCGGTTCTGACATCCAGATGACTCAGT
CTCCTAGCTCCCTGTCCGCCTCTGTGGGGGACCGAGTCACCATCACATGCAGAGCCAGCCAGGATATTTCTAGTTAC
CTGAACTGGTATCAGCAGAAGCCCGGAAAAGCACCTAAGCTGCTGATCTACTATACCTCCAGGCTGCACTCTGGCGT
GCCCAGTCGGTTCAGTGGCTCAGGGAGCGGAACCGACTTCACTTTTACCATCTCAAGCCTGCAGCCAGAGGATATTG
CCACATACTATTGTCAGCAGGGCAATACACTGCCCTACACTTTTGGCCAGGGGACCAAGGTGGAAATCAAACGTACG
GTGGCTGCACCATCTGTCTTCATCTTCCCGCCATCTGATGAGCAGTTGAAATCTGGAACTGCCTCTGTTGTGTGCCT
GCTGAATAACTTCTATCCCAGAGAGGCCAAAGTACAGTGGAAGGTGGATAACGCCCTCCAATCGGGTAACTCCCAGG
AGAGTGTCACAGAGCAGGACAGCAAGGACAGCACCTACAGCCTCAGCAGCACCCTGACGCTGAGCAAAGCAGACTAC
GAGAAACACAAAGTCTACGCCTGCGAAGTCACCCATCAGGGCCTGAGCTCGCCCGTCACAAAGAGCTTCAACAGGGG
AGAGTGTTAG]
Amino Acid Sequence
[spacer (SEQ ID NO: 87)][pLW080 without spacer (SEQ ID NO: 516)]
(SEQ ID NO: 474)
[QGQSGQ][YGSCSWNYVHIFMDCGSSGGSGGSGGLSGRSDNHGGGSDIQMTQSPSSLSASVGDRVTITCRASQDIS
SYLNWYQQKPGKAPKLLIYYTSRLHSGVPSRFSGSGSGTDFTFTISSLQPEDIATYYCQQGNTLPYTFGQGTKVEIK
RTVAAPSVFIFPPSDEQLKSGTASVVCLLNNFYPREAKVQWKVDNALQSGNSQESVTEQDSKDSTYSLSSTLTLSKA
DYEKHKVYACEVTHQGLSSPVTKSFNRGEC]*
CI039: 3954-2001-C225v5 N297Q-15865-2001-CD3LvHv-H-N
pLW101: HC C225v5N297Q-15865-2001-CD3LvHv-H-N
Nucleotide Sequence
[spacer (SEQ ID NO: 507)][pLW101 without spacer (SEQ ID NO: 517)]
(SEQ ID NO: 479)
[CAAGGCCAGTCTGGCCAA][ATGATGTATTGCGGTGGGAATGAGGTGTTGTGCGGGCCGCGGGTTGGCTCGAGCGG
TGGCAGCGGTGGCTCTGGTGGTATCTCTTCCGGACTGCTGTCCGGCAGATCCGACAATCACGGCGGCGGTTCTCAGA
CCGTGGTCACACAGGAGCCCTCACTGACAGTGAGCCCTGGCGGGACCGTCACACTGACTTGTCGCAGTTCAACTGGC
GCCGTGACTACCAGCAATTACGCTAACTGGGTCCAGCAGAAACCAGGACAGGCACCACGAGGACTGATCGGAGGAAC
TAATAAGAGAGCACCAGGAACCCCTGCAAGGTTCTCCGGATCTCTGCTGGGGGGAAAAGCCGCTCTGACACTGAGCG
GCGTGCAGCCTGAGGACGAAGCTGAGTACTATTGCGCACTGTGGTACTCCAACCTGTGGGTGTTTGGCGGGGGAACT
AAGCTGACCGTCCTGGGAGGAGGAGGAAGCGGAGGAGGAGGGAGCGGAGGAGGAGGATCCGAAGTGCAGCTGGTCGA
GAGCGGAGGAGGACTGGTGCAGCCAGGAGGATCCCTGAAGCTGTCTTGTGCAGCCAGTGGCTTCACCTTCAACACTT
ACGCAATGAACTGGGTGCGGCAGGCACCTGGGAAGGGACTGGAATGGGTCGCCCGGATCAGATCTAAATACAATAAC
TATGCCACCTACTATGCTGACAGTGTGAAGGATAGGTTCACCATTTCACGCGACGATAGCAAAAACACAGCTTATCT
GCAGATGAATAACCTGAAGACCGAGGATACAGCAGTGTACTATTGCGTCAGACACGGCAATTTCGGGAACTCTTACG
TGAGTTGGTTTGCCTATTGGGGACAGGGGACACTGGTCACCGTCTCCTCAGGAGGTGGTGGATCCCAGGTGCAGCTG
AAACAGAGCGGCCCGGGCCTGGTGCAGCCGAGCCAGAGCCTGAGCATTACCTGCACCGTGAGCGGCTTTAGCCTGAC
CAACTATGGCGTGCATTGGGTGCGCCAGAGCCCGGGCAAAGGCCTGGAATGGCTGGGCGTGATTTGGAGCGGCGGCA
ACACCGATTATAACACCCCGTTTACCAGCCGCCTGAGCATTAACAAAGATAACAGCAAAAGCCAGGTGTTTTTTAAA
ATGAACAGCCTGCAAAGCCAGGATACCGCGATTTATTATTGCGCGCGCGCGCTGACCTATTATGATTATGAATTTGC
GTATTGGGGCCAGGGCACCCTGGTGACCGTGAGCGCGGCTAGCACCAAGGGCCCATCGGTCTTCCCCCTGGCACCCT
CCTCCAAGAGCACCTCTGGGGGCACAGCGGCCCTGGGCTGCCTGGTCAAGGACTACTTCCCCGAACCGGTGACGGTG
TCGTGGAACTCAGGCGCCCTGACCAGCGGCGTGCACACCTTCCCGGCTGTCCTACAGTCCTCAGGACTCTACTCCCT
CAGCAGCGTGGTGACCGTGCCCTCCAGCAGCTTGGGCACCCAGACCTACATCTGCAACGTGAATCACAAGCCCAGCA
ACACCAAGGTGGACAAGAAAGTTGAGCCCAAATCTTGTGACAAAACTCACACATGCCCACCGTGCCCAGCACCTGAA
CTCCTGGGGGGACCGTCAGTCTTCCTCTTCCCCCCAAAACCCAAGGACACCCTCATGATCTCCCGGACCCCTGAGGT
CACATGCGTGGTGGTGGACGTGAGCCACGAAGACCCTGAGGTCAAGTTCAACTGGTACGTGGACGGCGTGGAGGTGC
ATAATGCCAAGACAAAGCCGCGGGAGGAGCAGTACCAGAGCACGTACCGTGTGGTCAGCGTCCTCACCGTCCTGCAC
CAGGACTGGCTGAATGGCAAGGAGTACAAGTGCAAGGTCTCCAACAAAGCCCTCCCAGCCCCCATCGAGAAAACCAT
CTCCAAAGCCAAAGGGCAGCCCCGAGAACCACAGGTGTACACCCTGCCCCCATCCCGGGAGGAGATGACCAAGAACC
AGGTCAGCCTGACCTGCCTGGTCAAAGGCTTCTATCCCAGCGACATCGCCGTGGAGTGGGAGAGCAATGGGCAGCCG
GAGAACAACTACAAGACCACGCCTCCCGTGCTGGACTCCGACGGCTCCTTCTTCCTCTACAGCAAGCTCACCGTGGA
CAAGAGCAGGTGGCAGCAGGGGAACGTCTTCTCATGCTCCGTGATGCATGAGGCTCTGCACAACCACTACACGCAGA
AGAGCCTCTCCCTGTCTCCGGGTAAATGA]
Amino Acid Sequence
[spacer (SEQ ID NO: 87)][pLW101 without spacer (SEQ ID NO: 518)]
(SEQ ID NO: 480)
[QGQSGQ][MMYCGGNEVLCGPRVGSSGGSGGSGGISSGLLSGRSDNHGGGSQTVVTQEPSLTVSPGGTVTLTCRSS
TGAVTTSNYANWVQQKPGQAPRGLIGGTNKRAPGTPARFSGSLLGGKAALTLSGVQPEDEAEYYCALWYSNLWVFGG
GTKLTVLGGGGSGGGGSGGGGSEVQLVESGGGLVQPGGSLKLSCAASGFTFNTYAMNWVRQAPGKGLEWVARIRSKY
NNYATYYADSVKDRFTISRDDSKNTAYLQMNNLKTEDTAVYYCVRHGNFGNSYVSWFAYWGQGTLVTVSSGGGGSQV
QLKQSGPGLVQPSQSLSITCTVSGFSLTNYGVHWVRQSPGKGLEWLGVIWSGGNTDYNTPFTSRLSINKDNSKSQVF
FKMNSLQSQDTAIYYCARALTYYDYEFAYWGQGTLVTVSAASTKGPSVFPLAPSSKSTSGGTAALGCLVKDYFPEPV
TVSWNSGALTSGVHTFPAVLQSSGLYSLSSVVTVPSSSLGTQTYICNVNHKPSNTKVDKKVEPKSCDKTHTCPPCPA
PELLGGPSVFLFPPKPKDTLMISRTPEVTCVVVDVSHEDPEVKFNWYVDGVEVHNAKTKPREEQYQSTYRVVSVLTV
LHQDWLNGKEYKCKVSNKALPAPIEKTISKAKGQPREPQVYTLPPSREEMTKNQVSLTCLVKGFYPSDIAVEWESNG
QPENNYKTTPPVLDSDGSFFLYSKLTVDKSRWQQGNVFSCSVMHEALHNHYTQKSLSLSPGK]*
LC C225-3954-2001
Nucleotide Sequence
[spacer (SEQ ID NO: 507)][3954-2001-C225v5 without spacer (SEQ ID NO: 519)]
(SEQ ID NO: 481)
[CAAGGCCAGTCTGGCCAG][TGCATCTCACCTCGTGGTTGTCCGGACGGCCCATACGTCATGTACGGCTCGAGCGG
TGGCAGCGGTGGCTCTGGTGGATCCGGTATTAGCAGTGGTCTGTTAAGCGGTCGTAGCGATAATCATGGCAGTAGCG
GTACCCAGATCTTGCTGACCCAGAGCCCGGTGATTCTGAGCGTGAGCCCGGGCGAACGTGTGAGCTTTAGCTGCCGC
GCGAGCCAGAGCATTGGCACCAACATTCATTGGTATCAGCAGCGCACCAACGGCAGCCCGCGCCTGCTGATTAAATA
TGCGAGCGAAAGCATTAGCGGCATTCCGAGCCGCTTTAGCGGCAGCGGCAGCGGCACCGATTTTACCCTGAGCATTA
ACAGCGTGGAAAGCGAAGATATTGCGGATTATTATTGCCAGCAGAACAACAACTGGCCGACCACCTTTGGCGCGGGC
ACCAAACTGGAACTGAAACGTACGGTGGCTGCACCATCTGTCTTCATCTTCCCGCCATCTGATGAGCAGTTGAAATC
TGGAACTGCCTCTGTTGTGTGCCTGCTGAATAACTTCTATCCCAGAGAGGCCAAAGTACAGTGGAAGGTGGATAACG
CCCTCCAATCGGGTAACTCCCAGGAGAGTGTCACAGAGCAGGACAGCAAGGACAGCACCTACAGCCTCAGCAGCACC
CTGACGCTGAGCAAAGCAGACTACGAGAAACACAAAGTCTACGCCTGCGAAGTCACCCATCAGGGCCTGAGCTCGCC
CGTCACAAAGAGCTTCAACAGGGGAGAGTGTTAG]
Amino Acid Sequence
[spacer (SEQ ID NO: 87)][pLW080 without spacer (SEQ ID NO: 520)]
(SEQ ID NO: 482)
[QGQSGQ][CISPRGCPDGPYVMYGSSGGSGGSGGSGISSGLLSGRSDNHGSSGTQILLTQSPVILSVSPGERVSFS
CRASQSIGTNIHWYQQRTNGSPRLLIKYASESISGIPSRFSGSGSGTDFTLSINSVESEDIADYYCQQNNNWPTTFG
AGTKLELKRTVAAPSVFIFPPSDEQLKSGTASVVCLLNNFYPREAKVQWKVDNALQSGNSQESVTEQDSKDSTYSLS
STLTLSKADYEKHKVYACEVTHQGLSSPVTKSFNRGEC]*
CI040: 3954-2001-C225v5 N297Q-CD3LvHv-H-N
pLW057: HC C225v5N297Q-CD3LvHv-H-N
Nucleotide Sequence
(SEQ ID NO: 479)
CAGACCGTGGTCACACAGGAGCCCTCACTGACAGTGAGCCCTGGCGGGACCGTCACACTGACTTGTCGCAGTTCAAC
TGGCGCCGTGACTACCAGCAATTACGCTAACTGGGTCCAGCAGAAACCAGGACAGGCACCACGAGGACTGATCGGAG
GAACTAATAAGAGAGCACCAGGAACCCCTGCAAGGTTCTCCGGATCTCTGCTGGGGGGAAAAGCCGCTCTGACACTG
AGCGGCGTGCAGCCTGAGGACGAAGCTGAGTACTATTGCGCACTGTGGTACTCCAACCTGTGGGTGTTTGGCGGGGG
AACTAAGCTGACCGTCCTGGGAGGAGGAGGAAGCGGAGGAGGAGGGAGCGGAGGAGGAGGATCCGAAGTGCAGCTGG
TCGAGAGCGGAGGAGGACTGGTGCAGCCAGGAGGATCCCTGAAGCTGTCTTGTGCAGCCAGTGGCTTCACCTTCAAC
ACTTACGCAATGAACTGGGTGCGGCAGGCACCTGGGAAGGGACTGGAATGGGTCGCCCGGATCAGATCTAAATACAA
TAACTATGCCACCTACTATGCTGACAGTGTGAAGGATAGGTTCACCATTTCACGCGACGATAGCAAAAACACAGCTT
ATCTGCAGATGAATAACCTGAAGACCGAGGATACAGCAGTGTACTATTGCGTCAGACACGGCAATTTCGGGAACTCT
TACGTGAGTTGGTTTGCCTATTGGGGACAGGGGACACTGGTCACCGTCTCCTCAGGAGGTGGTGGATCCCAGGTGCA
GCTGAAACAGAGCGGCCCGGGCCTGGTGCAGCCGAGCCAGAGCCTGAGCATTACCTGCACCGTGAGCGGCTTTAGCC
TGACCAACTATGGCGTGCATTGGGTGCGCCAGAGCCCGGGCAAAGGCCTGGAATGGCTGGGCGTGATTTGGAGCGGC
GGCAACACCGATTATAACACCCCGTTTACCAGCCGCCTGAGCATTAACAAAGATAACAGCAAAAGCCAGGTGTTTTT
TAAAATGAACAGCCTGCAAAGCCAGGATACCGCGATTTATTATTGCGCGCGCGCGCTGACCTATTATGATTATGAAT
TTGCGTATTGGGGCCAGGGCACCCTGGTGACCGTGAGCGCGGCTAGCACCAAGGGCCCATCGGTCTTCCCCCTGGCA
CCCTCCTCCAAGAGCACCTCTGGGGGCACAGCGGCCCTGGGCTGCCTGGTCAAGGACTACTTCCCCGAACCGGTGAC
GGTGTCGTGGAACTCAGGCGCCCTGACCAGCGGCGTGCACACCTTCCCGGCTGTCCTACAGTCCTCAGGACTCTACT
CCCTCAGCAGCGTGGTGACCGTGCCCTCCAGCAGCTTGGGCACCCAGACCTACATCTGCAACGTGAATCACAAGCCC
AGCAACACCAAGGTGGACAAGAAAGTTGAGCCCAAATCTTGTGACAAAACTCACACATGCCCACCGTGCCCAGCACC
TGAACTCCTGGGGGGACCGTCAGTCTTCCTCTTCCCCCCAAAACCCAAGGACACCCTCATGATCTCCCGGACCCCTG
AGGTCACATGCGTGGTGGTGGACGTGAGCCACGAAGACCCTGAGGTCAAGTTCAACTGGTACGTGGACGGCGTGGAG
GTGCATAATGCCAAGACAAAGCCGCGGGAGGAGCAGTACCAGAGCACGTACCGTGTGGTCAGCGTCCTCACCGTCCT
GCACCAGGACTGGCTGAATGGCAAGGAGTACAAGTGCAAGGTCTCCAACAAAGCCCTCCCAGCCCCCATCGAGAAAA
CCATCTCCAAAGCCAAAGGGCAGCCCCGAGAACCACAGGTGTACACCCTGCCCCCATCCCGGGAGGAGATGACCAAG
AACCAGGTCAGCCTGACCTGCCTGGTCAAAGGCTTCTATCCCAGCGACATCGCCGTGGAGTGGGAGAGCAATGGGCA
GCCGGAGAACAACTACAAGACCACGCCTCCCGTGCTGGACTCCGACGGCTCCTTCTTCCTCTACAGCAAGCTCACCG
TGGACAAGAGCAGGTGGCAGCAGGGGAACGTCTTCTCATGCTCCGTGATGCATGAGGCTCTGCACAACCACTACACG
CAGAAGAGCCTCTCCCTGTCTCCGGGTAAATGA
Amino Acid Sequence
(SEQ ID NO: 480)
QTVVTQEPSLTVSPGGTVTLTCRSSTGAVTTSNYANWVQQKPGQAPRGLIGGTNKRAPGTPARFSGSLLGGKAALTL
SGVQPEDEAEYYCALWYSNLWVFGGGTKLTVLGGGGSGGGGSGGGGSEVQLVESGGGLVQPGGSLKLSCAASGFTFN
TYAMNWVRQAPGKGLEWVARIRSKYNNYATYYADSVKDRFTISRDDSKNTAYLQMNNLKTEDTAVYYCVRHGNFGNS
YVSWFAYWGQGTLVTVSSGGGGSQVQLKQSGPGLVQPSQSLSITCTVSGFSLTNYGVHWVRQSPGKGLEWLGVIWSG
GNTDYNTPFTSRLSINKDNSKSQVFFKMNSLQSQDTAIYYCARALTYYDYEFAYWGQGTLVTVSAASTKGPSVFPLA
PSSKSTSGGTAALGCLVKDYFPEPVTVSWNSGALTSGVHTFPAVLQSSGLYSLSSVVTVPSSSLGTQTYICNVNHKP
SNTKVDKKVEPKSCDKTHTCPPCPAPELLGGPSVFLFPPKPKDTLMISRTPEVTCVVVDVSHEDPEVKFNWYVDGVE
VHNAKTKPREEQYQSTYRVVSVLTVLHQDWLNGKEYKCKVSNKALPAPIEKTISKAKGQPREPQVYTLPPSREEMTK
NQVSLTCLVKGFYPSDIAVEWESNGQPENNYKTTPPVLDSDGSFFLYSKLTVDKSRWQQGNVFSCSVMHEALHNHYT
QKSLSLSPGK*
LC C225-3954-2001
Nucleotide Sequence
[spacer (SEQ ID NO: 507)][3954-2001-C225v5without spacer (SEQ ID NO: 519)]
(SEQ ID NO: 481)
[CAAGGCCAGTCTGGCCAG][TGCATCTCACCTCGTGGTTGTCCGGACGGCCCATACGTCATGTACGGCTCGAGCGG
TGGCAGCGGTGGCTCTGGTGGATCCGGTATTAGCAGTGGTCTGTTAAGCGGTCGTAGCGATAATCATGGCAGTAGCG
GTACCCAGATCTTGCTGACCCAGAGCCCGGTGATTCTGAGCGTGAGCCCGGGCGAACGTGTGAGCTTTAGCTGCCGC
GCGAGCCAGAGCATTGGCACCAACATTCATTGGTATCAGCAGCGCACCAACGGCAGCCCGCGCCTGCTGATTAAATA
TGCGAGCGAAAGCATTAGCGGCATTCCGAGCCGCTTTAGCGGCAGCGGCAGCGGCACCGATTTTACCCTGAGCATTA
ACAGCGTGGAAAGCGAAGATATTGCGGATTATTATTGCCAGCAGAACAACAACTGGCCGACCACCTTTGGCGCGGGC
ACCAAACTGGAACTGAAACGTACGGTGGCTGCACCATCTGTCTTCATCTTCCCGCCATCTGATGAGCAGTTGAAATC
TGGAACTGCCTCTGTTGTGTGCCTGCTGAATAACTTCTATCCCAGAGAGGCCAAAGTACAGTGGAAGGTGGATAACG
CCCTCCAATCGGGTAACTCCCAGGAGAGTGTCACAGAGCAGGACAGCAAGGACAGCACCTACAGCCTCAGCAGCACC
CTGACGCTGAGCAAAGCAGACTACGAGAAACACAAAGTCTACGCCTGCGAAGTCACCCATCAGGGCCTGAGCTCGCC
CGTCACAAAGAGCTTCAACAGGGGAGAGTGTTAG]
Amino Acid Sequence
[spacer (SEQ ID NO: 87)][pLW080 without spacer (SEQ ID NO: 520)]
(SEQ ID NO: 482)
[QGQSGQ][CISPRGCPDGPYVMYGSSGGSGGSGGSGISSGLLSGRSDNHGSSGTQILLTQSPVILSVSPGERVSFS
CRASQSIGTNIHWYQQRTNGSPRLLIKYASESISGIPSRFSGSGSGTDFTLSINSVESEDIADYYCQQNNNWPTTFG
AGTKLELKRTVAAPSVFIFPPSDEQLKSGTASVVCLLNNFYPREAKVQWKVDNALQSGNSQESVTEQDSKDSTYSLS
STLTLSKADYEKHKVYACEVTHQGLSSPVTKSFNRGEC]*
CI021: C225v5N297Q-15003-CD3HvLv-H-N
pLW047: HC C225v5N297Q-15003-CD3HvLv-H-N
Nucleotide Sequence
[spacer (SEQ ID NO: 507)][pLW047 without spacer (SEQ ID NO: 522)]
(SEQ ID NO: 461)
[CAAGGCCAGTCTGGCCAA][GGTTATCGGTGGGGTTGCGAGTGGAATTGCGGTGGGATTACTACTGGCTCGAGCGG
TGGCAGCGGTGGCTCTGGTGGTCTGAGCGGCCGTTCCGATAATCATGGCGGCGGTTCTGAGGTGCAGCTGGTCGAGT
CTGGAGGAGGATTGGTGCAGCCTGGAGGGTCATTGAAACTCTCATGTGCAGCCTCTGGATTCACCTTCAATAAGTAC
GCCATGAACTGGGTCCGCCAGGCTCCAGGAAAGGGTTTGGAATGGGTTGCTCGCATAAGAAGTAAATATAATAATTA
TGCAACATATTATGCCGATTCAGTGAAAGACAGGTTCACCATCTCCAGAGATGATTCAAAAAACACTGCCTATCTAC
AAATGAACAACTTGAAAACTGAGGACACTGCCGTGTACTACTGTGTGAGACATGGGAACTTCGGTAATAGCTACATA
TCCTACTGGGCTTACTGGGGCCAAGGGACTCTGGTCACCGTCTCCTCAGGTGGTGGTGGTTCTGGCGGCGGCGGCTC
CGGTGGTGGTGGTTCTCAGACTGTTGTGACTCAGGAACCTTCACTCACCGTATCACCTGGTGGAACAGTCACACTCA
CTTGTGGCTCCTCGACTGGGGCTGTTACATCTGGCTACTACCCAAACTGGGTCCAACAAAAACCAGGTCAGGCACCC
CGTGGTCTAATAGGTGGGACTAAGTTCCTCGCCCCCGGTACTCCTGCCAGATTCTCAGGCTCCCTGCTTGGAGGCAA
GGCTGCCCTCACCCTCTCAGGGGTACAGCCAGAGGATGAGGCAGAATATTACTGTGCTCTATGGTACAGCAACCGCT
GGGTGTTCGGTGGAGGAACCAAACTGACTGTCCTAGGAGGTGGTGGATCCCAGGTGCAGCTGAAACAGAGCGGCCCG
GGCCTGGTGCAGCCGAGCCAGAGCCTGAGCATTACCTGCACCGTGAGCGGCTTTAGCCTGACCAACTATGGCGTGCA
TTGGGTGCGCCAGAGCCCGGGCAAAGGCCTGGAATGGCTGGGCGTGATTTGGAGCGGCGGCAACACCGATTATAACA
CCCCGTTTACCAGCCGCCTGAGCATTAACAAAGATAACAGCAAAAGCCAGGTGTTTTTTAAAATGAACAGCCTGCAA
AGCCAGGATACCGCGATTTATTATTGCGCGCGCGCGCTGACCTATTATGATTATGAATTTGCGTATTGGGGCCAGGG
CACCCTGGTGACCGTGAGCGCGGCTAGCACCAAGGGCCCATCGGTCTTCCCCCTGGCACCCTCCTCCAAGAGCACCT
CTGGGGGCACAGCGGCCCTGGGCTGCCTGGTCAAGGACTACTTCCCCGAACCGGTGACGGTGTCGTGGAACTCAGGC
GCCCTGACCAGCGGCGTGCACACCTTCCCGGCTGTCCTACAGTCCTCAGGACTCTACTCCCTCAGCAGCGTGGTGAC
CGTGCCCTCCAGCAGCTTGGGCACCCAGACCTACATCTGCAACGTGAATCACAAGCCCAGCAACACCAAGGTGGACA
AGAAAGTTGAGCCCAAATCTTGTGACAAAACTCACACATGCCCACCGTGCCCAGCACCTGAACTCCTGGGGGGACCG
TCAGTCTTCCTCTTCCCCCCAAAACCCAAGGACACCCTCATGATCTCCCGGACCCCTGAGGTCACATGCGTGGTGGT
GGACGTGAGCCACGAAGACCCTGAGGTCAAGTTCAACTGGTACGTGGACGGCGTGGAGGTGCATAATGCCAAGACAA
AGCCGCGGGAGGAGCAGTACCAGAGCACGTACCGTGTGGTCAGCGTCCTCACCGTCCTGCACCAGGACTGGCTGAAT
GGCAAGGAGTACAAGTGCAAGGTCTCCAACAAAGCCCTCCCAGCCCCCATCGAGAAAACCATCTCCAAAGCCAAAGG
GCAGCCCCGAGAACCACAGGTGTACACCCTGCCCCCATCCCGGGAGGAGATGACCAAGAACCAGGTCAGCCTGACCT
GCCTGGTCAAAGGCTTCTATCCCAGCGACATCGCCGTGGAGTGGGAGAGCAATGGGCAGCCGGAGAACAACTACAAG
ACCACGCCTCCCGTGCTGGACTCCGACGGCTCCTTCTTCCTCTACAGCAAGCTCACCGTGGACAAGAGCAGGTGGCA
GCAGGGGAACGTCTTCTCATGCTCCGTGATGCATGAGGCTCTGCACAACCACTACACGCAGAAGAGCCTCTCCCTGT
CTCCGGGTAAATGA]
Amino Acid Sequence
[spacer (SEQ ID NO: 87)][pLW047 without spacer (SEQ ID NO: 524)]
(SEQ ID NO: 462)
[QGQSGQ][GYRWGCEWNCGGITTGSSGGSGGSGGLSGRSDNHGGGSEVQLVESGGGLVQPGGSLKLSCAASGFTFN
KYAMNWVRQAPGKGLEWVARIRSKYNNYATYYADSVKDRFTISRDDSKNTAYLQMNNLKTEDTAVYYCVRHGNFGNS
YISYWAYWGQGTLVTVSSGGGGSGGGGSGGGGSQTVVTQEPSLTVSPGGTVTLTCGSSTGAVTSGYYPNWVQQKPGQ
APRGLIGGTKFLAPGTPARFSGSLLGGKAALTLSGVQPEDEAEYYCALWYSNRWVFGGGTKLTVLGGGGSQVQLKQS
GPGLVQPSQSLSITCTVSGFSLTNYGVHWVRQSPGKGLEWLGVIWSGGNTDYNTPFTSRLSINKDNSKSQVFFKMNS
LQSQDTAIYYCARALTYYDYEFAYWGQGTLVTVSAASTKGPSVFPLAPSSKSTSGGTAALGCLVKDYFPEPVTVSWN
SGALTSGVHTFPAVLQSSGLYSLSSVVTVPSSSLGTQTYICNVNHKPSNTKVDKKVEPKSCDKTHTCPPCPAPELLG
GPSVFLFPPKPKDTLMISRTPEVTCVVVDVSHEDPEVKFNWYVDGVEVHNAKTKPREEQYQSTYRVVSVLTVLHQDW
LNGKEYKCKVSNKALPAPIEKTISKAKGQPREPQVYTLPPSREEMTKNQVSLTCLVKGFYPSDIAVEWESNGQPENN
YKTTPPVLDSDGSFFLYSKLTVDKSRWQQGNVFSCSVMHEALHNHYTQKSLSLSPGK]*
OPP021: LC C225
Nucleotide Sequence
(SEQ ID NO: 457)
GATATCTTGCTGACCCAGAGCCCGGTGATTCTGAGCGTGAGCCCGGGCGAACGTGTGAGCTTTAGCTGCCGCGCGAG
CCAGAGCATTGGCACCAACATTCATTGGTATCAGCAGCGCACCAACGGCAGCCCGCGCCTGCTGATTAAATATGCGA
GCGAAAGCATTAGCGGCATTCCGAGCCGCTTTAGCGGCAGCGGCAGCGGCACCGATTTTACCCTGAGCATTAACAGC
GTGGAAAGCGAAGATATTGCGGATTATTATTGCCAGCAGAACAACAACTGGCCGACCACCTTTGGCGCGGGCACCAA
ACTGGAAATCAAACGTACGGTGGCTGCACCATCTGTCTTCATCTTCCCGCCATCTGATGAGCAGTTGAAATCTGGAA
CTGCCTCTGTTGTGTGCCTGCTGAATAACTTCTATCCCAGAGAGGCCAAAGTACAGTGGAAGGTGGATAACGCCCTC
CAATCGGGTAACTCCCAGGAGAGTGTCACAGAGCAGGACAGCAAGGACAGCACCTACAGCCTCAGCAGCACCCTGAC
GCTGAGCAAAGCAGACTACGAGAAACACAAAGTCTACGCCTGCGAAGTCACCCATCAGGGCCTGAGCTCGCCCGTCA
CAAAGAGCTTCAACAGGGGAGAGTGTTAG
Amino Acid Sequence
(SEQ ID NO: 458)
DILLTQSPVILSVSPGERVSFSCRASQSIGTNIHWYQQRTNGSPRLLIKYASESISGIPSRFSGSGSGTDFTLSINS
VESEDIADYYCQQNNNWPTTFGAGTKLEIKRTVAAPSVFIFPPSDEQLKSGTASVVCLLNNFYPREAKVQWKVDNAL
QSGNSQESVTEQDSKDSTYSLSSTLTLSKADYEKHKVYACEVTHQGLSSPVTKSFNRGEC*
CI022: C225v5N297Q-15865-CD3HvLv-H-N
pLW048: HC C225v5N297Q-15865-CD3HvLv-H-N
Nucleotide Sequence
[spacer (SEQ ID NO: 507)][pLW048 without spacer (SEQ ID NO: 525)]
(SEQ ID NO: 463)
[CAAGGCCAGTCTGGCCAA][ATGATGTATTGCGGTGGGAATGAGGTGTTGTGCGGGCCGCGGGTTGGCTCGAGCGG
TGGCAGCGGTGGCTCTGGTGGTCTGAGCGGCCGTTCCGATAATCATGGCGGCGGTTCTGAGGTGCAGCTGGTCGAGT
CTGGAGGAGGATTGGTGCAGCCTGGAGGGTCATTGAAACTCTCATGTGCAGCCTCTGGATTCACCTTCAATAAGTAC
GCCATGAACTGGGTCCGCCAGGCTCCAGGAAAGGGTTTGGAATGGGTTGCTCGCATAAGAAGTAAATATAATAATTA
TGCAACATATTATGCCGATTCAGTGAAAGACAGGTTCACCATCTCCAGAGATGATTCAAAAAACACTGCCTATCTAC
AAATGAACAACTTGAAAACTGAGGACACTGCCGTGTACTACTGTGTGAGACATGGGAACTTCGGTAATAGCTACATA
TCCTACTGGGCTTACTGGGGCCAAGGGACTCTGGTCACCGTCTCCTCAGGTGGTGGTGGTTCTGGCGGCGGCGGCTC
CGGTGGTGGTGGTTCTCAGACTGTTGTGACTCAGGAACCTTCACTCACCGTATCACCTGGTGGAACAGTCACACTCA
CTTGTGGCTCCTCGACTGGGGCTGTTACATCTGGCTACTACCCAAACTGGGTCCAACAAAAACCAGGTCAGGCACCC
CGTGGTCTAATAGGTGGGACTAAGTTCCTCGCCCCCGGTACTCCTGCCAGATTCTCAGGCTCCCTGCTTGGAGGCAA
GGCTGCCCTCACCCTCTCAGGGGTACAGCCAGAGGATGAGGCAGAATATTACTGTGCTCTATGGTACAGCAACCGCT
GGGTGTTCGGTGGAGGAACCAAACTGACTGTCCTAGGAGGTGGTGGATCCCAGGTGCAGCTGAAACAGAGCGGCCCG
GGCCTGGTGCAGCCGAGCCAGAGCCTGAGCATTACCTGCACCGTGAGCGGCTTTAGCCTGACCAACTATGGCGTGCA
TTGGGTGCGCCAGAGCCCGGGCAAAGGCCTGGAATGGCTGGGCGTGATTTGGAGCGGCGGCAACACCGATTATAACA
CCCCGTTTACCAGCCGCCTGAGCATTAACAAAGATAACAGCAAAAGCCAGGTGTTTTTTAAAATGAACAGCCTGCAA
AGCCAGGATACCGCGATTTATTATTGCGCGCGCGCGCTGACCTATTATGATTATGAATTTGCGTATTGGGGCCAGGG
CACCCTGGTGACCGTGAGCGCGGCTAGCACCAAGGGCCCATCGGTCTTCCCCCTGGCACCCTCCTCCAAGAGCACCT
CTGGGGGCACAGCGGCCCTGGGCTGCCTGGTCAAGGACTACTTCCCCGAACCGGTGACGGTGTCGTGGAACTCAGGC
GCCCTGACCAGCGGCGTGCACACCTTCCCGGCTGTCCTACAGTCCTCAGGACTCTACTCCCTCAGCAGCGTGGTGAC
CGTGCCCTCCAGCAGCTTGGGCACCCAGACCTACATCTGCAACGTGAATCACAAGCCCAGCAACACCAAGGTGGACA
AGAAAGTTGAGCCCAAATCTTGTGACAAAACTCACACATGCCCACCGTGCCCAGCACCTGAACTCCTGGGGGGACCG
TCAGTCTTCCTCTTCCCCCCAAAACCCAAGGACACCCTCATGATCTCCCGGACCCCTGAGGTCACATGCGTGGTGGT
GGACGTGAGCCACGAAGACCCTGAGGTCAAGTTCAACTGGTACGTGGACGGCGTGGAGGTGCATAATGCCAAGACAA
AGCCGCGGGAGGAGCAGTACCAGAGCACGTACCGTGTGGTCAGCGTCCTCACCGTCCTGCACCAGGACTGGCTGAAT
GGCAAGGAGTACAAGTGCAAGGTCTCCAACAAAGCCCTCCCAGCCCCCATCGAGAAAACCATCTCCAAAGCCAAAGG
GCAGCCCCGAGAACCACAGGTGTACACCCTGCCCCCATCCCGGGAGGAGATGACCAAGAACCAGGTCAGCCTGACCT
GCCTGGTCAAAGGCTTCTATCCCAGCGACATCGCCGTGGAGTGGGAGAGCAATGGGCAGCCGGAGAACAACTACAAG
ACCACGCCTCCCGTGCTGGACTCCGACGGCTCCTTCTTCCTCTACAGCAAGCTCACCGTGGACAAGAGCAGGTGGCA
GCAGGGGAACGTCTTCTCATGCTCCGTGATGCATGAGGCTCTGCACAACCACTACACGCAGAAGAGCCTCTCCCTGT
CTCCGGGTAAATGA]
Amino Acid Sequence
[spacer (SEQ ID NO: 87)][pLW048 without spacer (SEQ ID NO: 526)]
(SEQ ID NO: 464)
[QGQSGQ][MMYCGGNEVLCGPRVGSSGGSGGSGGLSGRSDNHGGGSEVQLVESGGGLVQPGGSLKLSCAASGFTFN
KYAMNWVRQAPGKGLEWVARIRSKYNNYATYYADSVKDRFTISRDDSKNTAYLQMNNLKTEDTAVYYCVRHGNFGNS
YISYWAYWGQGTLVTVSSGGGGSGGGGSGGGGSQTVVTQEPSLTVSPGGTVTLTCGSSTGAVTSGYYPNWVQQKPGQ
APRGLIGGTKFLAPGTPARFSGSLLGGKAALTLSGVQPEDEAEYYCALWYSNRWVFGGGTKLTVLGGGGSQVQLKQS
GPGLVQPSQSLSITCTVSGFSLTNYGVHWVRQSPGKGLEWLGVIWSGGNTDYNTPFTSRLSINKDNSKSQVFFKMNS
LQSQDTAIYYCARALTYYDYEFAYWGQGTLVTVSAASTKGPSVFPLAPSSKSTSGGTAALGCLVKDYFPEPVTVSWN
SGALTSGVHTFPAVLQSSGLYSLSSVVTVPSSSLGTQTYICNVNHKPSNTKVDKKVEPKSCDKTHTCPPCPAPELLG
GPSVFLFPPKPKDTLMISRTPEVTCVVVDVSHEDPEVKFNWYVDGVEVHNAKTKPREEQYQSTYRVVSVLTVLHQDW
LNGKEYKCKVSNKALPAPIEKTISKAKGQPREPQVYTLPPSREEMTKNQVSLTCLVKGFYPSDIAVEWESNGQPENN
YKTTPPVLDSDGSFFLYSKLTVDKSRWQQGNVFSCSVMHEALHNHYTQKSLSLSPGK]*
OPP021: LC C225
Nucleotide Sequence
(SEQ ID NO: 457)
GATATCTTGCTGACCCAGAGCCCGGTGATTCTGAGCGTGAGCCCGGGCGAACGTGTGAGCTTTAGCTGCCGCGCGAG
CCAGAGCATTGGCACCAACATTCATTGGTATCAGCAGCGCACCAACGGCAGCCCGCGCCTGCTGATTAAATATGCGA
GCGAAAGCATTAGCGGCATTCCGAGCCGCTTTAGCGGCAGCGGCAGCGGCACCGATTTTACCCTGAGCATTAACAGC
GTGGAAAGCGAAGATATTGCGGATTATTATTGCCAGCAGAACAACAACTGGCCGACCACCTTTGGCGCGGGCACCAA
ACTGGAAATCAAACGTACGGTGGCTGCACCATCTGTCTTCATCTTCCCGCCATCTGATGAGCAGTTGAAATCTGGAA
CTGCCTCTGTTGTGTGCCTGCTGAATAACTTCTATCCCAGAGAGGCCAAAGTACAGTGGAAGGTGGATAACGCCCTC
CAATCGGGTAACTCCCAGGAGAGTGTCACAGAGCAGGACAGCAAGGACAGCACCTACAGCCTCAGCAGCACCCTGAC
GCTGAGCAAAGCAGACTACGAGAAACACAAAGTCTACGCCTGCGAAGTCACCCATCAGGGCCTGAGCTCGCCCGTCA
CAAAGAGCTTCAACAGGGGAGAGTGTTAG
Amino Acid Sequence
(SEQ ID NO: 458)
DILLTQSPVILSVSPGERVSFSCRASQSIGTNIHWYQQRTNGSPRLLIKYASESISGIPSRFSGSGSGTDFTLSINS
VESEDIADYYCQQNNNWPTTFGAGTKLEIKRTVAAPSVFIFPPSDEQLKSGTASVVCLLNNFYPREAKVQWKVDNAL
QSGNSQESVTEQDSKDSTYSLSSTLTLSKADYEKHKVYACEVTHQGLSSPVTKSFNRGEC*
CI023: 3954-1204-C225v5N297Q-15003-CD3HvLv-H-N
pLW047: HC C225v5N297Q-15003-CD3HvLv-H-N
Nucleotide Sequence
[spacer (SEQ ID NO: 507)][pLW047 without spacer (SEQ ID NO: 522)]
(SEQ ID NO: 461)
[CAAGGCCAGTCTGGCCAA][GGTTATCGGTGGGGTTGCGAGTGGAATTGCGGTGGGATTACTACTGGCTCGAGCGG
TGGCAGCGGTGGCTCTGGTGGTCTGAGCGGCCGTTCCGATAATCATGGCGGCGGTTCTGAGGTGCAGCTGGTCGAGT
CTGGAGGAGGATTGGTGCAGCCTGGAGGGTCATTGAAACTCTCATGTGCAGCCTCTGGATTCACCTTCAATAAGTAC
GCCATGAACTGGGTCCGCCAGGCTCCAGGAAAGGGTTTGGAATGGGTTGCTCGCATAAGAAGTAAATATAATAATTA
TGCAACATATTATGCCGATTCAGTGAAAGACAGGTTCACCATCTCCAGAGATGATTCAAAAAACACTGCCTATCTAC
AAATGAACAACTTGAAAACTGAGGACACTGCCGTGTACTACTGTGTGAGACATGGGAACTTCGGTAATAGCTACATA
TCCTACTGGGCTTACTGGGGCCAAGGGACTCTGGTCACCGTCTCCTCAGGTGGTGGTGGTTCTGGCGGCGGCGGCTC
CGGTGGTGGTGGTTCTCAGACTGTTGTGACTCAGGAACCTTCACTCACCGTATCACCTGGTGGAACAGTCACACTCA
CTTGTGGCTCCTCGACTGGGGCTGTTACATCTGGCTACTACCCAAACTGGGTCCAACAAAAACCAGGTCAGGCACCC
CGTGGTCTAATAGGTGGGACTAAGTTCCTCGCCCCCGGTACTCCTGCCAGATTCTCAGGCTCCCTGCTTGGAGGCAA
GGCTGCCCTCACCCTCTCAGGGGTACAGCCAGAGGATGAGGCAGAATATTACTGTGCTCTATGGTACAGCAACCGCT
GGGTGTTCGGTGGAGGAACCAAACTGACTGTCCTAGGAGGTGGTGGATCCCAGGTGCAGCTGAAACAGAGCGGCCCG
GGCCTGGTGCAGCCGAGCCAGAGCCTGAGCATTACCTGCACCGTGAGCGGCTTTAGCCTGACCAACTATGGCGTGCA
TTGGGTGCGCCAGAGCCCGGGCAAAGGCCTGGAATGGCTGGGCGTGATTTGGAGCGGCGGCAACACCGATTATAACA
CCCCGTTTACCAGCCGCCTGAGCATTAACAAAGATAACAGCAAAAGCCAGGTGTTTTTTAAAATGAACAGCCTGCAA
AGCCAGGATACCGCGATTTATTATTGCGCGCGCGCGCTGACCTATTATGATTATGAATTTGCGTATTGGGGCCAGGG
CACCCTGGTGACCGTGAGCGCGGCTAGCACCAAGGGCCCATCGGTCTTCCCCCTGGCACCCTCCTCCAAGAGCACCT
CTGGGGGCACAGCGGCCCTGGGCTGCCTGGTCAAGGACTACTTCCCCGAACCGGTGACGGTGTCGTGGAACTCAGGC
GCCCTGACCAGCGGCGTGCACACCTTCCCGGCTGTCCTACAGTCCTCAGGACTCTACTCCCTCAGCAGCGTGGTGAC
CGTGCCCTCCAGCAGCTTGGGCACCCAGACCTACATCTGCAACGTGAATCACAAGCCCAGCAACACCAAGGTGGACA
AGAAAGTTGAGCCCAAATCTTGTGACAAAACTCACACATGCCCACCGTGCCCAGCACCTGAACTCCTGGGGGGACCG
TCAGTCTTCCTCTTCCCCCCAAAACCCAAGGACACCCTCATGATCTCCCGGACCCCTGAGGTCACATGCGTGGTGGT
GGACGTGAGCCACGAAGACCCTGAGGTCAAGTTCAACTGGTACGTGGACGGCGTGGAGGTGCATAATGCCAAGACAA
AGCCGCGGGAGGAGCAGTACCAGAGCACGTACCGTGTGGTCAGCGTCCTCACCGTCCTGCACCAGGACTGGCTGAAT
GGCAAGGAGTACAAGTGCAAGGTCTCCAACAAAGCCCTCCCAGCCCCCATCGAGAAAACCATCTCCAAAGCCAAAGG
GCAGCCCCGAGAACCACAGGTGTACACCCTGCCCCCATCCCGGGAGGAGATGACCAAGAACCAGGTCAGCCTGACCT
GCCTGGTCAAAGGCTTCTATCCCAGCGACATCGCCGTGGAGTGGGAGAGCAATGGGCAGCCGGAGAACAACTACAAG
ACCACGCCTCCCGTGCTGGACTCCGACGGCTCCTTCTTCCTCTACAGCAAGCTCACCGTGGACAAGAGCAGGTGGCA
GCAGGGGAACGTCTTCTCATGCTCCGTGATGCATGAGGCTCTGCACAACCACTACACGCAGAAGAGCCTCTCCCTGT
CTCCGGGTAAATGA]
Amino Acid Sequence
[spacer (SEQ ID NO: 87)][pLW047 without spacer (SEQ ID NO: 524)]
(SEQ ID NO: 462)
[QGQSGQ][GYRWGCEWNCGGITTGSSGGSGGSGGLSGRSDNHGGGSEVQLVESGGGLVQPGGSLKLSCAASGFTFN
KYAMNWVRQAPGKGLEWVARIRSKYNNYATYYADSVKDRFTISRDDSKNTAYLQMNNLKTEDTAVYYCVRHGNFGNS
YISYWAYWGQGTLVTVSSGGGGSGGGGSGGGGSQTVVTQEPSLTVSPGGTVTLTCGSSTGAVTSGYYPNWVQQKPGQ
APRGLIGGTKFLAPGTPARFSGSLLGGKAALTLSGVQPEDEAEYYCALWYSNRWVFGGGTKLTVLGGGGSQVQLKQS
GPGLVQPSQSLSITCTVSGFSLTNYGVHWVRQSPGKGLEWLGVIWSGGNTDYNTPFTSRLSINKDNSKSQVFFKMNS
LQSQDTAIYYCARALTYYDYEFAYWGQGTLVTVSAASTKGPSVFPLAPSSKSTSGGTAALGCLVKDYFPEPVTVSWN
SGALTSGVHTFPAVLQSSGLYSLSSVVTVPSSSLGTQTYICNVNHKPSNTKVDKKVEPKSCDKTHTCPPCPAPELLG
GPSVFLFPPKPKDTLMISRTPEVTCVVVDVSHEDPEVKFNWYVDGVEVHNAKTKPREEQYQSTYRVVSVLTVLHQDW
LNGKEYKCKVSNKALPAPIEKTISKAKGQPREPQVYTLPPSREEMTKNQVSLTCLVKGFYPSDIAVEWESNGQPENN
YKTTPPVLDSDGSFFLYSKLTVDKSRWQQGNVFSCSVMHEALHNHYTQKSLSLSPGK]*
OPP022: LC C225 3954-1204
Nucleotide Sequence
[spacer (SEQ ID NO: 507)][OPP022 without spacer (SEQ ID NO: 509)]
(SEQ ID NO: 449)
[CAAGGCCAGTCTGGCCAG][TGCATCTCACCTCGTGGTTGTCCGGACGGCCCATACGTCATGTACGGCTCGAGCGG
TGGCAGCGGTGGCTCTGGTGGATCCGGTCTGAGCGGCCGTTCCGATAATCATGGCAGTAGCGGTACCCAGATCTTGC
TGACCCAGAGCCCGGTGATTCTGAGCGTGAGCCCGGGCGAACGTGTGAGCTTTAGCTGCCGCGCGAGCCAGAGCATT
GGCACCAACATTCATTGGTATCAGCAGCGCACCAACGGCAGCCCGCGCCTGCTGATTAAATATGCGAGCGAAAGCAT
TAGCGGCATTCCGAGCCGCTTTAGCGGCAGCGGCAGCGGCACCGATTTTACCCTGAGCATTAACAGCGTGGAAAGCG
AAGATATTGCGGATTATTATTGCCAGCAGAACAACAACTGGCCGACCACCTTTGGCGCGGGCACCAAACTGGAACTG
AAACGTACGGTGGCTGCACCATCTGTCTTCATCTTCCCGCCATCTGATGAGCAGTTGAAATCTGGAACTGCCTCTGT
TGTGTGCCTGCTGAATAACTTCTATCCCAGAGAGGCCAAAGTACAGTGGAAGGTGGATAACGCCCTCCAATCGGGTA
ACTCCCAGGAGAGTGTCACAGAGCAGGACAGCAAGGACAGCACCTACAGCCTCAGCAGCACCCTGACGCTGAGCAAA
GCAGACTACGAGAAACACAAAGTCTACGCCTGCGAAGTCACCCATCAGGGCCTGAGCTCGCCCGTCACAAAGAGCTT
CAACAGGGGAGAGTGTTAG]
Amino Acid Sequence
[spacer (SEQ ID NO: 87)][OPP022 without spacer (SEQ ID NO: 508)]
(SEQ ID NO: 450)
[QGQSGQ][CISPRGCPDGPYVMYGSSGGSGGSGGSGLSGRSDNHGSSGTQILLTQSPVILSVSPGERVSFSCRASQ
SIGTNIHWYQQRTNGSPRLLIKYASESISGIPSRFSGSGSGTDFTLSINSVESEDIADYYCQQNNNWPTTFGAGTKL
ELKRTVAAPSVFIFPPSDEQLKSGTASVVCLLNNFYPREAKVQWKVDNALQSGNSQESVTEQDSKDSTYSLSSTLTL
SKADYEKHKVYACEVTHQGLSSPVTKSFNRGEC]*
CI024: 3954-1204-C225v5N297Q-15865-CD3HvLv-H-N
pLW048: HC C225v5N297Q-15865-CD3HvLv-H-N
Nucleotide Sequence
[spacer (SEQ ID NO: 507)][pLW048 without spacer (SEQ ID NO: 525)]
(SEQ ID NO: 463)
[CAAGGCCAGTCTGGCCAA][ATGATGTATTGCGGTGGGAATGAGGTGTTGTGCGGGCCGCGGGTTGGCTCGAGCGG
TGGCAGCGGTGGCTCTGGTGGTCTGAGCGGCCGTTCCGATAATCATGGCGGCGGTTCTGAGGTGCAGCTGGTCGAGT
CTGGAGGAGGATTGGTGCAGCCTGGAGGGTCATTGAAACTCTCATGTGCAGCCTCTGGATTCACCTTCAATAAGTAC
GCCATGAACTGGGTCCGCCAGGCTCCAGGAAAGGGTTTGGAATGGGTTGCTCGCATAAGAAGTAAATATAATAATTA
TGCAACATATTATGCCGATTCAGTGAAAGACAGGTTCACCATCTCCAGAGATGATTCAAAAAACACTGCCTATCTAC
AAATGAACAACTTGAAAACTGAGGACACTGCCGTGTACTACTGTGTGAGACATGGGAACTTCGGTAATAGCTACATA
TCCTACTGGGCTTACTGGGGCCAAGGGACTCTGGTCACCGTCTCCTCAGGTGGTGGTGGTTCTGGCGGCGGCGGCTC
CGGTGGTGGTGGTTCTCAGACTGTTGTGACTCAGGAACCTTCACTCACCGTATCACCTGGTGGAACAGTCACACTCA
CTTGTGGCTCCTCGACTGGGGCTGTTACATCTGGCTACTACCCAAACTGGGTCCAACAAAAACCAGGTCAGGCACCC
CGTGGTCTAATAGGTGGGACTAAGTTCCTCGCCCCCGGTACTCCTGCCAGATTCTCAGGCTCCCTGCTTGGAGGCAA
GGCTGCCCTCACCCTCTCAGGGGTACAGCCAGAGGATGAGGCAGAATATTACTGTGCTCTATGGTACAGCAACCGCT
GGGTGTTCGGTGGAGGAACCAAACTGACTGTCCTAGGAGGTGGTGGATCCCAGGTGCAGCTGAAACAGAGCGGCCCG
GGCCTGGTGCAGCCGAGCCAGAGCCTGAGCATTACCTGCACCGTGAGCGGCTTTAGCCTGACCAACTATGGCGTGCA
TTGGGTGCGCCAGAGCCCGGGCAAAGGCCTGGAATGGCTGGGCGTGATTTGGAGCGGCGGCAACACCGATTATAACA
CCCCGTTTACCAGCCGCCTGAGCATTAACAAAGATAACAGCAAAAGCCAGGTGTTTTTTAAAATGAACAGCCTGCAA
AGCCAGGATACCGCGATTTATTATTGCGCGCGCGCGCTGACCTATTATGATTATGAATTTGCGTATTGGGGCCAGGG
CACCCTGGTGACCGTGAGCGCGGCTAGCACCAAGGGCCCATCGGTCTTCCCCCTGGCACCCTCCTCCAAGAGCACCT
CTGGGGGCACAGCGGCCCTGGGCTGCCTGGTCAAGGACTACTTCCCCGAACCGGTGACGGTGTCGTGGAACTCAGGC
GCCCTGACCAGCGGCGTGCACACCTTCCCGGCTGTCCTACAGTCCTCAGGACTCTACTCCCTCAGCAGCGTGGTGAC
CGTGCCCTCCAGCAGCTTGGGCACCCAGACCTACATCTGCAACGTGAATCACAAGCCCAGCAACACCAAGGTGGACA
AGAAAGTTGAGCCCAAATCTTGTGACAAAACTCACACATGCCCACCGTGCCCAGCACCTGAACTCCTGGGGGGACCG
TCAGTCTTCCTCTTCCCCCCAAAACCCAAGGACACCCTCATGATCTCCCGGACCCCTGAGGTCACATGCGTGGTGGT
GGACGTGAGCCACGAAGACCCTGAGGTCAAGTTCAACTGGTACGTGGACGGCGTGGAGGTGCATAATGCCAAGACAA
AGCCGCGGGAGGAGCAGTACCAGAGCACGTACCGTGTGGTCAGCGTCCTCACCGTCCTGCACCAGGACTGGCTGAAT
GGCAAGGAGTACAAGTGCAAGGTCTCCAACAAAGCCCTCCCAGCCCCCATCGAGAAAACCATCTCCAAAGCCAAAGG
GCAGCCCCGAGAACCACAGGTGTACACCCTGCCCCCATCCCGGGAGGAGATGACCAAGAACCAGGTCAGCCTGACCT
GCCTGGTCAAAGGCTTCTATCCCAGCGACATCGCCGTGGAGTGGGAGAGCAATGGGCAGCCGGAGAACAACTACAAG
ACCACGCCTCCCGTGCTGGACTCCGACGGCTCCTTCTTCCTCTACAGCAAGCTCACCGTGGACAAGAGCAGGTGGCA
GCAGGGGAACGTCTTCTCATGCTCCGTGATGCATGAGGCTCTGCACAACCACTACACGCAGAAGAGCCTCTCCCTGT
CTCCGGGTAAATGA]
Amino Acid Sequence
[spacer (SEQ ID NO: 87)][pLW048 without spacer (SEQ ID NO: 526)]
(SEQ ID NO: 464)
[QGQSGQ][MMYCGGNEVLCGPRVGSSGGSGGSGGLSGRSDNHGGGSEVQLVESGGGLVQPGGSLKLSCAASGFTFN
KYAMNWVRQAPGKGLEWVARIRSKYNNYATYYADSVKDRFTISRDDSKNTAYLQMNNLKTEDTAVYYCVRHGNFGNS
YISYWAYWGQGTLVTVSSGGGGSGGGGSGGGGSQTVVTQEPSLTVSPGGTVTLTCGSSTGAVTSGYYPNWVQQKPGQ
APRGLIGGTKFLAPGTPARFSGSLLGGKAALTLSGVQPEDEAEYYCALWYSNRWVFGGGTKLTVLGGGGSQVQLKQS
GPGLVQPSQSLSITCTVSGFSLTNYGVHWVRQSPGKGLEWLGVIWSGGNTDYNTPFTSRLSINKDNSKSQVFFKMNS
LQSQDTAIYYCARALTYYDYEFAYWGQGTLVTVSAASTKGPSVFPLAPSSKSTSGGTAALGCLVKDYFPEPVTVSWN
SGALTSGVHTFPAVLQSSGLYSLSSVVTVPSSSLGTQTYICNVNHKPSNTKVDKKVEPKSCDKTHTCPPCPAPELLG
GPSVFLFPPKPKDTLMISRTPEVTCVVVDVSHEDPEVKFNWYVDGVEVHNAKTKPREEQYQSTYRVVSVLTVLHQDW
LNGKEYKCKVSNKALPAPIEKTISKAKGQPREPQVYTLPPSREEMTKNQVSLTCLVKGFYPSDIAVEWESNGQPENN
YKTTPPVLDSDGSFFLYSKLTVDKSRWQQGNVFSCSVMHEALHNHYTQKSLSLSPGK]*
OPP022: LC C225 3954-1204
Nucleotide Sequence
[spacer (SEQ ID NO: 507)][OPP022 without spacer (SEQ ID NO: 509)]
(SEQ ID NO: 449)
[CAAGGCCAGTCTGGCCAG][TGCATCTCACCTCGTGGTTGTCCGGACGGCCCATACGTCATGTACGGCTCGAGCGG
TGGCAGCGGTGGCTCTGGTGGATCCGGTCTGAGCGGCCGTTCCGATAATCATGGCAGTAGCGGTACCCAGATCTTGC
TGACCCAGAGCCCGGTGATTCTGAGCGTGAGCCCGGGCGAACGTGTGAGCTTTAGCTGCCGCGCGAGCCAGAGCATT
GGCACCAACATTCATTGGTATCAGCAGCGCACCAACGGCAGCCCGCGCCTGCTGATTAAATATGCGAGCGAAAGCAT
TAGCGGCATTCCGAGCCGCTTTAGCGGCAGCGGCAGCGGCACCGATTTTACCCTGAGCATTAACAGCGTGGAAAGCG
AAGATATTGCGGATTATTATTGCCAGCAGAACAACAACTGGCCGACCACCTTTGGCGCGGGCACCAAACTGGAACTG
AAACGTACGGTGGCTGCACCATCTGTCTTCATCTTCCCGCCATCTGATGAGCAGTTGAAATCTGGAACTGCCTCTGT
TGTGTGCCTGCTGAATAACTTCTATCCCAGAGAGGCCAAAGTACAGTGGAAGGTGGATAACGCCCTCCAATCGGGTA
ACTCCCAGGAGAGTGTCACAGAGCAGGACAGCAAGGACAGCACCTACAGCCTCAGCAGCACCCTGACGCTGAGCAAA
GCAGACTACGAGAAACACAAAGTCTACGCCTGCGAAGTCACCCATCAGGGCCTGAGCTCGCCCGTCACAAAGAGCTT
CAACAGGGGAGAGTGTTAG]
Amino Acid Sequence
[spacer (SEQ ID NO: 87)][OPP022 without spacer (SEQ ID NO: 508)]
(SEQ ID NO: 450)
[QGQSGQ][CISPRGCPDGPYVMYGSSGGSGGSGGSGLSGRSDNHGSSGTQILLTQSPVILSVSPGERVSFSCRASQ
SIGTNIHWYQQRTNGSPRLLIKYASESISGIPSRFSGSGSGTDFTLSINSVESEDIADYYCQQNNNWPTTFGAGTKL
ELKRTVAAPSVFIFPPSDEQLKSGTASVVCLLNNFYPREAKVQWKVDNALQSGNSQESVTEQDSKDSTYSLSSTLTL
SKADYEKHKVYACEVTHQGLSSPVTKSFNRGEC]*
CI028: IL6R 4792 Nsub N297Q-15865 1204-CD3LvHv-H-N
pLW085: HC IL6RN297Q-15865 1204-CD3LvHv-H-N
Nucleotide Sequence
[spacer (SEQ ID NO: 507)][pLW085 without spacer (SEQ ID NO: 513)]
(SEQ ID NO: 471)
[CAAGGCCAGTCTGGCCAA][ATGATGTATTGCGGTGGGAATGAGGTGTTGTGCGGGCCGCGGGTTGGCTCGAGCGG
TGGCAGCGGTGGCTCTGGTGGTCTGAGCGGCCGTTCCGATAATCATGGCGGCGGTTCTCAGACCGTGGTCACACAGG
AGCCCTCACTGACAGTGAGCCCTGGCGGGACCGTCACACTGACTTGTCGCAGTTCAACTGGCGCCGTGACTACCAGC
AATTACGCTAACTGGGTCCAGCAGAAACCAGGACAGGCACCACGAGGACTGATCGGAGGAACTAATAAGAGAGCACC
AGGAACCCCTGCAAGGTTCTCCGGATCTCTGCTGGGGGGAAAAGCCGCTCTGACACTGAGCGGCGTGCAGCCTGAGG
ACGAAGCTGAGTACTATTGCGCACTGTGGTACTCCAACCTGTGGGTGTTTGGCGGGGGAACTAAGCTGACCGTCCTG
GGAGGAGGAGGAAGCGGAGGAGGAGGGAGCGGAGGAGGAGGATCCGAAGTGCAGCTGGTCGAGAGCGGAGGAGGACT
GGTGCAGCCAGGAGGATCCCTGAAGCTGTCTTGTGCAGCCAGTGGCTTCACCTTCAACACTTACGCAATGAACTGGG
TGCGGCAGGCACCTGGGAAGGGACTGGAATGGGTCGCCCGGATCAGATCTAAATACAATAACTATGCCACCTACTAT
GCTGACAGTGTGAAGGATAGGTTCACCATTTCACGCGACGATAGCAAAAACACAGCTTATCTGCAGATGAATAACCT
GAAGACCGAGGATACAGCAGTGTACTATTGCGTCAGACACGGCAATTTCGGGAACTCTTACGTGAGTTGGTTTGCCT
ATTGGGGACAGGGGACACTGGTCACCGTCTCCTCAGGAGGTGGTGGATCCCAGGTGCAGCTGCAGGAGTCCGGACCA
GGACTGGTCCGGCCCTCACAGACTCTGAGCCTGACATGCACTGTGTCAGGCTACAGCATCACCTCCGATCACGCCTG
GAGCTGGGTCAGGCAGCCACCTGGACGCGGCCTGGAATGGATCGGCTACATTTCTTATAGTGGGATCACCACATACA
ACCCCTCTCTGAAGAGTCGAGTGACCATTTCCAGAGACAACTCTAAAAATACACTGTATCTGCAGATGAATAGTCTG
CGGGCCGAGGATACAGCTGTGTACTATTGTGCACGGTCTCTGGCCAGAACTACCGCTATGGACTATTGGGGGCAGGG
AAGCCTGGTGACCGTCAGCTCCGCTAGCACCAAGGGCCCATCGGTCTTCCCCCTGGCACCCTCCTCCAAGAGCACCT
CTGGGGGCACAGCGGCCCTGGGCTGCCTGGTCAAGGACTACTTCCCCGAACCGGTGACGGTGTCGTGGAACTCAGGC
GCCCTGACCAGCGGCGTGCACACCTTCCCGGCTGTCCTACAGTCCTCAGGACTCTACTCCCTCAGCAGCGTGGTGAC
CGTGCCCTCCAGCAGCTTGGGCACCCAGACCTACATCTGCAACGTGAATCACAAGCCCAGCAACACCAAGGTGGACA
AGAAAGTTGAGCCCAAATCTTGTGACAAAACTCACACATGCCCACCGTGCCCAGCACCTGAACTCCTGGGGGGACCG
TCAGTCTTCCTCTTCCCCCCAAAACCCAAGGACACCCTCATGATCTCCCGGACCCCTGAGGTCACATGCGTGGTGGT
GGACGTGAGCCACGAAGACCCTGAGGTCAAGTTCAACTGGTACGTGGACGGCGTGGAGGTGCATAATGCCAAGACAA
AGCCGCGGGAGGAGCAGTACCAGAGCACGTACCGTGTGGTCAGCGTCCTCACCGTCCTGCACCAGGACTGGCTGAAT
GGCAAGGAGTACAAGTGCAAGGTCTCCAACAAAGCCCTCCCAGCCCCCATCGAGAAAACCATCTCCAAAGCCAAAGG
GCAGCCCCGAGAACCACAGGTGTACACCCTGCCCCCATCCCGGGAGGAGATGACCAAGAACCAGGTCAGCCTGACCT
GCCTGGTCAAAGGCTTCTATCCCAGCGACATCGCCGTGGAGTGGGAGAGCAATGGGCAGCCGGAGAACAACTACAAG
ACCACGCCTCCCGTGCTGGACTCCGACGGCTCCTTCTTCCTCTACAGCAAGCTCACCGTGGACAAGAGCAGGTGGCA
GCAGGGGAACGTCTTCTCATGCTCCGTGATGCATGAGGCTCTGCACAACCACTACACGCAGAAGAGCCTCTCCCTGT
CTCCGGGTAAATGA]
Amino Acid Sequence
[spacer (SEQ ID NO: 87)][pLW085 without spacer (SEQ ID NO: 514)]
(SEQ ID NO: 472)
[QGQSGQ][MMYCGGNEVLCGPRVGSSGGSGGSGGLSGRSDNHGGGSQTVVTQEPSLTVSPGGTVTLTCRSSTGAVT
TSNYANWVQQKPGQAPRGLIGGTNKRAPGTPARFSGSLLGGKAALTLSGVQPEDEAEYYCALWYSNLWVFGGGTKLT
VLGGGGSGGGGSGGGGSEVQLVESGGGLVQPGGSLKLSCAASGFTFNTYAMNWVRQAPGKGLEWVARIRSKYNNYAT
YYADSVKDRFTISRDDSKNTAYLQMNNLKTEDTAVYYCVRHGNFGNSYVSWFAYWGQGTLVTVSSGGGGSQVQLQES
GPGLVRPSQTLSLTCTVSGYSITSDHAWSWVRQPPGRGLEWIGYISYSGITTYNPSLKSRVTISRDNSKNTLYLQMN
SLRAEDTAVYYCARSLARTTAMDYWGQGSLVTVSSASTKGPSVFPLAPSSKSTSGGTAALGCLVKDYFPEPVTVSWN
SGALTSGVHTFPAVLQSSGLYSLSSVVTVPSSSLGTQTYICNVNHKPSNTKVDKKVEPKSCDKTHTCPPCPAPELLG
GPSVFLFPPKPKDTLMISRTPEVTCVVVDVSHEDPEVKFNWYVDGVEVHNAKTKPREEQYQSTYRVVSVLTVLHQDW
LNGKEYKCKVSNKALPAPIEKTISKAKGQPREPQVYTLPPSREEMTKNQVSLTCLVKGFYPSDIAVEWESNGQPENN
YKTTPPVLDSDGSFFLYSKLTVDKSRWQQGNVFSCSVMHEALHNHYTQKSLSLSPGK]*
pLW079: LC IL6R 4792 Nsub
Nucleotide Sequence
[spacer (SEQ ID NO: 507)][pLW079 without spacer (SEQ ID NO: 527)]
(SEQ ID NO: 473)
[CAAGGCCAGTCTGGCCAG][TATGGGTCCTGCAGTTGGAACTATGTACACATATTCATGGATTGCGGCTCGAGCGG
TGGCAGCGGTGGCTCTGGTGGCTCAGGTGGAGGCTCGGGCGGTGGGAGCGGCGGTTCTGACATCCAGATGACTCAGT
CTCCTAGCTCCCTGTCCGCCTCTGTGGGGGACCGAGTCACCATCACATGCAGAGCCAGCCAGGATATTTCTAGTTAC
CTGAACTGGTATCAGCAGAAGCCCGGAAAAGCACCTAAGCTGCTGATCTACTATACCTCCAGGCTGCACTCTGGCGT
GCCCAGTCGGTTCAGTGGCTCAGGGAGCGGAACCGACTTCACTTTTACCATCTCAAGCCTGCAGCCAGAGGATATTG
CCACATACTATTGTCAGCAGGGCAATACACTGCCCTACACTTTTGGCCAGGGGACCAAGGTGGAAATCAAACGTACG
GTGGCTGCACCATCTGTCTTCATCTTCCCGCCATCTGATGAGCAGTTGAAATCTGGAACTGCCTCTGTTGTGTGCCT
GCTGAATAACTTCTATCCCAGAGAGGCCAAAGTACAGTGGAAGGTGGATAACGCCCTCCAATCGGGTAACTCCCAGG
AGAGTGTCACAGAGCAGGACAGCAAGGACAGCACCTACAGCCTCAGCAGCACCCTGACGCTGAGCAAAGCAGACTAC
GAGAAACACAAAGTCTACGCCTGCGAAGTCACCCATCAGGGCCTGAGCTCGCCCGTCACAAAGAGCTTCAACAGGGG
AGAGTGTTAG]
Amino Acid Sequence
[spacer (SEQ ID NO: 87)][pLW079 without spacer (SEQ ID NO: 528)]
(SEQ ID NO: 474)
[QGQSGQ][YGSCSWNYVHIFMDCGSSGGSGGSGGSGGGSGGGSGGSDIQMTQSPSSLSASVGDRVTITCRASQDIS
SYLNWYQQKPGKAPKLLIYYTSRLHSGVPSRFSGSGSGTDFTFTISSLQPEDIATYYCQQGNTLPYTFGQGTKVEIK
RTVAAPSVFIFPPSDEQLKSGTASVVCLLNNFYPREAKVQWKVDNALQSGNSQESVTEQDSKDSTYSLSSTLTLSKA
DYEKHKVYACEVTHQGLSSPVTKSFNRGEC]*
CI030: IL6RN297Q-15865 Nsub-CD3LvHv-H-N
pLW087: HC IL6RN297Q-15865_Nsub-CD3LvHv-H-N
Nucleotide Sequence
[spacer (SEQ ID NO: 507)][pLW087 without spacer (SEQ ID NO: 529)]
(SEQ ID NO: 477)
[CAAGGCCAGTCTGGCCAA][ATGATGTATTGCGGTGGGAATGAGGTGTTGTGCGGGCCGCGGGTTGGCTCGAGCGG
TGGCAGCGGTGGCTCTGGTGGTGGTGGAGGCTCGGGCGGTGGGAGCGGCGGCGGTTCTCAGACCGTGGTCACACAGG
AGCCCTCACTGACAGTGAGCCCTGGCGGGACCGTCACACTGACTTGTCGCAGTTCAACTGGCGCCGTGACTACCAGC
AATTACGCTAACTGGGTCCAGCAGAAACCAGGACAGGCACCACGAGGACTGATCGGAGGAACTAATAAGAGAGCACC
AGGAACCCCTGCAAGGTTCTCCGGATCTCTGCTGGGGGGAAAAGCCGCTCTGACACTGAGCGGCGTGCAGCCTGAGG
ACGAAGCTGAGTACTATTGCGCACTGTGGTACTCCAACCTGTGGGTGTTTGGCGGGGGAACTAAGCTGACCGTCCTG
GGAGGAGGAGGAAGCGGAGGAGGAGGGAGCGGAGGAGGAGGATCCGAAGTGCAGCTGGTCGAGAGCGGAGGAGGACT
GGTGCAGCCAGGAGGATCCCTGAAGCTGTCTTGTGCAGCCAGTGGCTTCACCTTCAACACTTACGCAATGAACTGGG
TGCGGCAGGCACCTGGGAAGGGACTGGAATGGGTCGCCCGGATCAGATCTAAATACAATAACTATGCCACCTACTAT
GCTGACAGTGTGAAGGATAGGTTCACCATTTCACGCGACGATAGCAAAAACACAGCTTATCTGCAGATGAATAACCT
GAAGACCGAGGATACAGCAGTGTACTATTGCGTCAGACACGGCAATTTCGGGAACTCTTACGTGAGTTGGTTTGCCT
ATTGGGGACAGGGGACACTGGTCACCGTCTCCTCAGGAGGTGGTGGATCCCAGGTGCAGCTGCAGGAGTCCGGACCA
GGACTGGTCCGGCCCTCACAGACTCTGAGCCTGACATGCACTGTGTCAGGCTACAGCATCACCTCCGATCACGCCTG
GAGCTGGGTCAGGCAGCCACCTGGACGCGGCCTGGAATGGATCGGCTACATTTCTTATAGTGGGATCACCACATACA
ACCCCTCTCTGAAGAGTCGAGTGACCATTTCCAGAGACAACTCTAAAAATACACTGTATCTGCAGATGAATAGTCTG
CGGGCCGAGGATACAGCTGTGTACTATTGTGCACGGTCTCTGGCCAGAACTACCGCTATGGACTATTGGGGGCAGGG
AAGCCTGGTGACCGTCAGCTCCGCTAGCACCAAGGGCCCATCGGTCTTCCCCCTGGCACCCTCCTCCAAGAGCACCT
CTGGGGGCACAGCGGCCCTGGGCTGCCTGGTCAAGGACTACTTCCCCGAACCGGTGACGGTGTCGTGGAACTCAGGC
GCCCTGACCAGCGGCGTGCACACCTTCCCGGCTGTCCTACAGTCCTCAGGACTCTACTCCCTCAGCAGCGTGGTGAC
CGTGCCCTCCAGCAGCTTGGGCACCCAGACCTACATCTGCAACGTGAATCACAAGCCCAGCAACACCAAGGTGGACA
AGAAAGTTGAGCCCAAATCTTGTGACAAAACTCACACATGCCCACCGTGCCCAGCACCTGAACTCCTGGGGGGACCG
TCAGTCTTCCTCTTCCCCCCAAAACCCAAGGACACCCTCATGATCTCCCGGACCCCTGAGGTCACATGCGTGGTGGT
GGACGTGAGCCACGAAGACCCTGAGGTCAAGTTCAACTGGTACGTGGACGGCGTGGAGGTGCATAATGCCAAGACAA
AGCCGCGGGAGGAGCAGTACCAGAGCACGTACCGTGTGGTCAGCGTCCTCACCGTCCTGCACCAGGACTGGCTGAAT
GGCAAGGAGTACAAGTGCAAGGTCTCCAACAAAGCCCTCCCAGCCCCCATCGAGAAAACCATCTCCAAAGCCAAAGG
GCAGCCCCGAGAACCACAGGTGTACACCCTGCCCCCATCCCGGGAGGAGATGACCAAGAACCAGGTCAGCCTGACCT
GCCTGGTCAAAGGCTTCTATCCCAGCGACATCGCCGTGGAGTGGGAGAGCAATGGGCAGCCGGAGAACAACTACAAG
ACCACGCCTCCCGTGCTGGACTCCGACGGCTCCTTCTTCCTCTACAGCAAGCTCACCGTGGACAAGAGCAGGTGGCA
GCAGGGGAACGTCTTCTCATGCTCCGTGATGCATGAGGCTCTGCACAACCACTACACGCAGAAGAGCCTCTCCCTGT
CTCCGGGTAAATGA]
Amino Acid Sequence
[spacer (SEQ ID NO: 87)][pLW087 without spacer (SEQ ID NO: 530)]
(SEQ ID NO: 478)
[QGQSGQ][MMYCGGNEVLCGPRVGSSGGSGGSGGGGGSGGGSGGGSQTVVTQEPSLTVSPGGTVTLTCRSSTGAVT
TSNYANWVQQKPGQAPRGLIGGTNKRAPGTPARFSGSLLGGKAALTLSGVQPEDEAEYYCALWYSNLWVFGGGTKLT
VLGGGGSGGGGSGGGGSEVQLVESGGGLVQPGGSLKLSCAASGFTFNTYAMNWVRQAPGKGLEWVARIRSKYNNYAT
YYADSVKDRFTISRDDSKNTAYLQMNNLKTEDTAVYYCVRHGNFGNSYVSWFAYWGQGTLVTVSSGGGGSQVQLQES
GPGLVRPSQTLSLTCTVSGYSITSDHAWSWVRQPPGRGLEWIGYISYSGITTYNPSLKSRVTISRDNSKNTLYLQMN
SLRAEDTAVYYCARSLARTTAMDYWGQGSLVTVSSASTKGPSVFPLAPSSKSTSGGTAALGCLVKDYFPEPVTVSWN
SGALTSGVHTFPAVLQSSGLYSLSSVVTVPSSSLGTQTYICNVNHKPSNTKVDKKVEPKSCDKTHTCPPCPAPELLG
GPSVFLFPPKPKDTLMISRTPEVTCVVVDVSHEDPEVKFNWYVDGVEVHNAKTKPREEQYQSTYRVVSVLTVLHQDW
LNGKEYKCKVSNKALPAPIEKTISKAKGQPREPQVYTLPPSREEMTKNQVSLTCLVKGFYPSDIAVEWESNGQPENN
YKTTPPVLDSDGSFFLYSKLTVDKSRWQQGNVFSCSVMHEALHNHYTQKSLSLSPGK]*
pLW077: LC IL6R
Nucleotide Sequence
(SEQ ID NO: 467)
GACATCCAGATGACTCAGTCTCCTAGCTCCCTGTCCGCCTCTGTGGGGGACCGAGTCACCATCACATGCAGAGCCAG
CCAGGATATTTCTAGTTACCTGAACTGGTATCAGCAGAAGCCCGGAAAAGCACCTAAGCTGCTGATCTACTATACCT
CCAGGCTGCACTCTGGCGTGCCCAGTCGGTTCAGTGGCTCAGGGAGCGGAACCGACTTCACTTTTACCATCTCAAGC
CTGCAGCCAGAGGATATTGCCACATACTATTGTCAGCAGGGCAATACACTGCCCTACACTTTTGGCCAGGGGACCAA
GGTGGAAATCAAACGTACGGTGGCTGCACCATCTGTCTTCATCTTCCCGCCATCTGATGAGCAGTTGAAATCTGGAA
CTGCCTCTGTTGTGTGCCTGCTGAATAACTTCTATCCCAGAGAGGCCAAAGTACAGTGGAAGGTGGATAACGCCCTC
CAATCGGGTAACTCCCAGGAGAGTGTCACAGAGCAGGACAGCAAGGACAGCACCTACAGCCTCAGCAGCACCCTGAC
GCTGAGCAAAGCAGACTACGAGAAACACAAAGTCTACGCCTGCGAAGTCACCCATCAGGGCCTGAGCTCGCCCGTCA
CAAAGAGCTTCAACAGGGGAGAGTGTTAG
Amino Acid Sequence
(SEQ ID NO: 468)
[sequence omitted]
CI031: IL6R 4792 Nsub N297Q-15865 Nsub-CD3LvHv-H-N
pLW087: HC IL6RN297Q-15865_Nsub-CD3LvHv-H-N
Nucleotide Sequence
[spacer (SEQ ID NO: 507)][pLW087 without spacer (SEQ ID NO: 529)]
(SEQ ID NO: 477)
[CAAGGCCAGTCTGGCCAA][ATGATGTATTGCGGTGGGAATGAGGTGTTGTGCGGGCCGCGGGTTGGCTCGAGCGG
TGGCAGCGGTGGCTCTGGTGGTGGTGGAGGCTCGGGCGGTGGGAGCGGCGGCGGTTCTCAGACCGTGGTCACACAGG
AGCCCTCACTGACAGTGAGCCCTGGCGGGACCGTCACACTGACTTGTCGCAGTTCAACTGGCGCCGTGACTACCAGC
AATTACGCTAACTGGGTCCAGCAGAAACCAGGACAGGCACCACGAGGACTGATCGGAGGAACTAATAAGAGAGCACC
AGGAACCCCTGCAAGGTTCTCCGGATCTCTGCTGGGGGGAAAAGCCGCTCTGACACTGAGCGGCGTGCAGCCTGAGG
ACGAAGCTGAGTACTATTGCGCACTGTGGTACTCCAACCTGTGGGTGTTTGGCGGGGGAACTAAGCTGACCGTCCTG
GGAGGAGGAGGAAGCGGAGGAGGAGGGAGCGGAGGAGGAGGATCCGAAGTGCAGCTGGTCGAGAGCGGAGGAGGACT
GGTGCAGCCAGGAGGATCCCTGAAGCTGTCTTGTGCAGCCAGTGGCTTCACCTTCAACACTTACGCAATGAACTGGG
TGCGGCAGGCACCTGGGAAGGGACTGGAATGGGTCGCCCGGATCAGATCTAAATACAATAACTATGCCACCTACTAT
GCTGACAGTGTGAAGGATAGGTTCACCATTTCACGCGACGATAGCAAAAACACAGCTTATCTGCAGATGAATAACCT
GAAGACCGAGGATACAGCAGTGTACTATTGCGTCAGACACGGCAATTTCGGGAACTCTTACGTGAGTTGGTTTGCCT
ATTGGGGACAGGGGACACTGGTCACCGTCTCCTCAGGAGGTGGTGGATCCCAGGTGCAGCTGCAGGAGTCCGGACCA
GGACTGGTCCGGCCCTCACAGACTCTGAGCCTGACATGCACTGTGTCAGGCTACAGCATCACCTCCGATCACGCCTG
GAGCTGGGTCAGGCAGCCACCTGGACGCGGCCTGGAATGGATCGGCTACATTTCTTATAGTGGGATCACCACATACA
ACCCCTCTCTGAAGAGTCGAGTGACCATTTCCAGAGACAACTCTAAAAATACACTGTATCTGCAGATGAATAGTCTG
CGGGCCGAGGATACAGCTGTGTACTATTGTGCACGGTCTCTGGCCAGAACTACCGCTATGGACTATTGGGGGCAGGG
AAGCCTGGTGACCGTCAGCTCCGCTAGCACCAAGGGCCCATCGGTCTTCCCCCTGGCACCCTCCTCCAAGAGCACCT
CTGGGGGCACAGCGGCCCTGGGCTGCCTGGTCAAGGACTACTTCCCCGAACCGGTGACGGTGTCGTGGAACTCAGGC
GCCCTGACCAGCGGCGTGCACACCTTCCCGGCTGTCCTACAGTCCTCAGGACTCTACTCCCTCAGCAGCGTGGTGAC
CGTGCCCTCCAGCAGCTTGGGCACCCAGACCTACATCTGCAACGTGAATCACAAGCCCAGCAACACCAAGGTGGACA
AGAAAGTTGAGCCCAAATCTTGTGACAAAACTCACACATGCCCACCGTGCCCAGCACCTGAACTCCTGGGGGGACCG
TCAGTCTTCCTCTTCCCCCCAAAACCCAAGGACACCCTCATGATCTCCCGGACCCCTGAGGTCACATGCGTGGTGGT
GGACGTGAGCCACGAAGACCCTGAGGTCAAGTTCAACTGGTACGTGGACGGCGTGGAGGTGCATAATGCCAAGACAA
AGCCGCGGGAGGAGCAGTACCAGAGCACGTACCGTGTGGTCAGCGTCCTCACCGTCCTGCACCAGGACTGGCTGAAT
GGCAAGGAGTACAAGTGCAAGGTCTCCAACAAAGCCCTCCCAGCCCCCATCGAGAAAACCATCTCCAAAGCCAAAGG
GCAGCCCCGAGAACCACAGGTGTACACCCTGCCCCCATCCCGGGAGGAGATGACCAAGAACCAGGTCAGCCTGACCT
GCCTGGTCAAAGGCTTCTATCCCAGCGACATCGCCGTGGAGTGGGAGAGCAATGGGCAGCCGGAGAACAACTACAAG
ACCACGCCTCCCGTGCTGGACTCCGACGGCTCCTTCTTCCTCTACAGCAAGCTCACCGTGGACAAGAGCAGGTGGCA
GCAGGGGAACGTCTTCTCATGCTCCGTGATGCATGAGGCTCTGCACAACCACTACACGCAGAAGAGCCTCTCCCTGT
CTCCGGGTAAATGA]
Amino Acid Sequence
[spacer (SEQ ID NO: 87)][pLW087 without spacer (SEQ ID NO: 530)]
(SEQ ID NO: 478)
[QGQSGQ][MMYCGGNEVLCGPRVGSSGGSGGSGGGGGSGGGSGGGSQTVVTQEPSLTVSPGGTVTLTCRSSTGAVT
TSNYANWVQQKPGQAPRGLIGGTNKRAPGTPARFSGSLLGGKAALTLSGVQPEDEAEYYCALWYSNLWVFGGGTKLT
VLGGGGSGGGGSGGGGSEVQLVESGGGLVQPGGSLKLSCAASGFTFNTYAMNWVRQAPGKGLEWVARIRSKYNNYAT
YYADSVKDRFTISRDDSKNTAYLQMNNLKTEDTAVYYCVRHGNFGNSYVSWFAYWGQGTLVTVSSGGGGSQVQLQES
GPGLVRPSQTLSLTCTVSGYSITSDHAWSWVRQPPGRGLEWIGYISYSGITTYNPSLKSRVTISRDNSKNTLYLQMN
SLRAEDTAVYYCARSLARTTAMDYWGQGSLVTVSSASTKGPSVFPLAPSSKSTSGGTAALGCLVKDYFPEPVTVSWN
SGALTSGVHTFPAVLQSSGLYSLSSVVTVPSSSLGTQTYICNVNHKPSNTKVDKKVEPKSCDKTHTCPPCPAPELLG
GPSVFLFPPKPKDTLMISRTPEVTCVVVDVSHEDPEVKFNWYVDGVEVHNAKTKPREEQYQSTYRVVSVLTVLHQDW
LNGKEYKCKVSNKALPAPIEKTISKAKGQPREPQVYTLPPSREEMTKNQVSLTCLVKGFYPSDIAVEWESNGQPENN
YKTTPPVLDSDGSFFLYSKLTVDKSRWQQGNVFSCSVMHEALHNHYTQKSLSLSPGK]*
pLW079: LC IL6R 4792 Nsub
Nucleotide Sequence
[spacer (SEQ ID NO: 507)][pLW079 without spacer (SEQ ID NO: 527)]
(SEQ ID NO: 473)
[CAAGGCCAGTCTGGCCAG][TATGGGTCCTGCAGTTGGAACTATGTACACATATTCATGGATTGCGGCTCGAGCGG
TGGCAGCGGTGGCTCTGGTGGCTCAGGTGGAGGCTCGGGCGGTGGGAGCGGCGGTTCTGACATCCAGATGACTCAGT
CTCCTAGCTCCCTGTCCGCCTCTGTGGGGGACCGAGTCACCATCACATGCAGAGCCAGCCAGGATATTTCTAGTTAC
CTGAACTGGTATCAGCAGAAGCCCGGAAAAGCACCTAAGCTGCTGATCTACTATACCTCCAGGCTGCACTCTGGCGT
GCCCAGTCGGTTCAGTGGCTCAGGGAGCGGAACCGACTTCACTTTTACCATCTCAAGCCTGCAGCCAGAGGATATTG
CCACATACTATTGTCAGCAGGGCAATACACTGCCCTACACTTTTGGCCAGGGGACCAAGGTGGAAATCAAACGTACG
GTGGCTGCACCATCTGTCTTCATCTTCCCGCCATCTGATGAGCAGTTGAAATCTGGAACTGCCTCTGTTGTGTGCCT
GCTGAATAACTTCTATCCCAGAGAGGCCAAAGTACAGTGGAAGGTGGATAACGCCCTCCAATCGGGTAACTCCCAGG
AGAGTGTCACAGAGCAGGACAGCAAGGACAGCACCTACAGCCTCAGCAGCACCCTGACGCTGAGCAAAGCAGACTAC
GAGAAACACAAAGTCTACGCCTGCGAAGTCACCCATCAGGGCCTGAGCTCGCCCGTCACAAAGAGCTTCAACAGGGG
AGAGTGTTAG]
Amino Acid Sequence
[spacer (SEQ ID NO: 87)][pLW079 without spacer (SEQ ID NO: 528)]
(SEQ ID NO: 474)
[QGQSGQ][YGSCSWNYVHIFMDCGSSGGSGGSGGSGGGSGGGSGGSDIQMTQSPSSLSASVGDRVTITCRASQDIS
SYLNWYQQKPGKAPKLLIYYTSRLHSGVPSRFSGSGSGTDFTFTISSLQPEDIATYYCQQGNTLPYTFGQGTKVEIK
RTVAAPSVFIFPPSDEQLKSGTASVVCLLNNFYPREAKVQWKVDNALQSGNSQESVTEQDSKDSTYSLSSTLTLSKA
DYEKHKVYACEVTHQGLSSPVTKSFNRGEC]*
CI032: 4792-1204-IL6RN297Q-15865 Nsub-CD3LvHv-H-N
pLW087: HC IL6RN297Q-15865_Nsub-CD3LvHv-H-N
Nucleotide Sequence
[spacer (SEQ ID NO: 507)][pLW087 without spacer (SEQ ID NO: 529)]
(SEQ ID NO: 477)
[CAAGGCCAGTCTGGCCAA][ATGATGTATTGCGGTGGGAATGAGGTGTTGTGCGGGCCGCGGGTTGGCTCGAGCGG
TGGCAGCGGTGGCTCTGGTGGTGGTGGAGGCTCGGGCGGTGGGAGCGGCGGCGGTTCTCAGACCGTGGTCACACAGG
AGCCCTCACTGACAGTGAGCCCTGGCGGGACCGTCACACTGACTTGTCGCAGTTCAACTGGCGCCGTGACTACCAGC
AATTACGCTAACTGGGTCCAGCAGAAACCAGGACAGGCACCACGAGGACTGATCGGAGGAACTAATAAGAGAGCACC
AGGAACCCCTGCAAGGTTCTCCGGATCTCTGCTGGGGGGAAAAGCCGCTCTGACACTGAGCGGCGTGCAGCCTGAGG
ACGAAGCTGAGTACTATTGCGCACTGTGGTACTCCAACCTGTGGGTGTTTGGCGGGGGAACTAAGCTGACCGTCCTG
GGAGGAGGAGGAAGCGGAGGAGGAGGGAGCGGAGGAGGAGGATCCGAAGTGCAGCTGGTCGAGAGCGGAGGAGGACT
GGTGCAGCCAGGAGGATCCCTGAAGCTGTCTTGTGCAGCCAGTGGCTTCACCTTCAACACTTACGCAATGAACTGGG
TGCGGCAGGCACCTGGGAAGGGACTGGAATGGGTCGCCCGGATCAGATCTAAATACAATAACTATGCCACCTACTAT
GCTGACAGTGTGAAGGATAGGTTCACCATTTCACGCGACGATAGCAAAAACACAGCTTATCTGCAGATGAATAACCT
GAAGACCGAGGATACAGCAGTGTACTATTGCGTCAGACACGGCAATTTCGGGAACTCTTACGTGAGTTGGTTTGCCT
ATTGGGGACAGGGGACACTGGTCACCGTCTCCTCAGGAGGTGGTGGATCCCAGGTGCAGCTGCAGGAGTCCGGACCA
GGACTGGTCCGGCCCTCACAGACTCTGAGCCTGACATGCACTGTGTCAGGCTACAGCATCACCTCCGATCACGCCTG
GAGCTGGGTCAGGCAGCCACCTGGACGCGGCCTGGAATGGATCGGCTACATTTCTTATAGTGGGATCACCACATACA
ACCCCTCTCTGAAGAGTCGAGTGACCATTTCCAGAGACAACTCTAAAAATACACTGTATCTGCAGATGAATAGTCTG
CGGGCCGAGGATACAGCTGTGTACTATTGTGCACGGTCTCTGGCCAGAACTACCGCTATGGACTATTGGGGGCAGGG
AAGCCTGGTGACCGTCAGCTCCGCTAGCACCAAGGGCCCATCGGTCTTCCCCCTGGCACCCTCCTCCAAGAGCACCT
CTGGGGGCACAGCGGCCCTGGGCTGCCTGGTCAAGGACTACTTCCCCGAACCGGTGACGGTGTCGTGGAACTCAGGC
GCCCTGACCAGCGGCGTGCACACCTTCCCGGCTGTCCTACAGTCCTCAGGACTCTACTCCCTCAGCAGCGTGGTGAC
CGTGCCCTCCAGCAGCTTGGGCACCCAGACCTACATCTGCAACGTGAATCACAAGCCCAGCAACACCAAGGTGGACA
AGAAAGTTGAGCCCAAATCTTGTGACAAAACTCACACATGCCCACCGTGCCCAGCACCTGAACTCCTGGGGGGACCG
TCAGTCTTCCTCTTCCCCCCAAAACCCAAGGACACCCTCATGATCTCCCGGACCCCTGAGGTCACATGCGTGGTGGT
GGACGTGAGCCACGAAGACCCTGAGGTCAAGTTCAACTGGTACGTGGACGGCGTGGAGGTGCATAATGCCAAGACAA
AGCCGCGGGAGGAGCAGTACCAGAGCACGTACCGTGTGGTCAGCGTCCTCACCGTCCTGCACCAGGACTGGCTGAAT
GGCAAGGAGTACAAGTGCAAGGTCTCCAACAAAGCCCTCCCAGCCCCCATCGAGAAAACCATCTCCAAAGCCAAAGG
GCAGCCCCGAGAACCACAGGTGTACACCCTGCCCCCATCCCGGGAGGAGATGACCAAGAACCAGGTCAGCCTGACCT
GCCTGGTCAAAGGCTTCTATCCCAGCGACATCGCCGTGGAGTGGGAGAGCAATGGGCAGCCGGAGAACAACTACAAG
ACCACGCCTCCCGTGCTGGACTCCGACGGCTCCTTCTTCCTCTACAGCAAGCTCACCGTGGACAAGAGCAGGTGGCA
GCAGGGGAACGTCTTCTCATGCTCCGTGATGCATGAGGCTCTGCACAACCACTACACGCAGAAGAGCCTCTCCCTGT
CTCCGGGTAAATGA]
Amino Acid Sequence
[spacer (SEQ ID NO: 87)][pLW087 without spacer (SEQ ID NO: 530)]
(SEQ ID NO: 478)
[QGQSGQ][MMYCGGNEVLCGPRVGSSGGSGGSGGGGGSGGGSGGGSQTVVTQEPSLTVSPGGTVTLTCRSSTGAVT
TSNYANWVQQKPGQAPRGLIGGTNKRAPGTPARFSGSLLGGKAALTLSGVQPEDEAEYYCALWYSNLWVFGGGTKLT
VLGGGGSGGGGSGGGGSEVQLVESGGGLVQPGGSLKLSCAASGFTFNTYAMNWVRQAPGKGLEWVARIRSKYNNYAT
YYADSVKDRFTISRDDSKNTAYLQMNNLKTEDTAVYYCVRHGNFGNSYVSWFAYWGQGTLVTVSSGGGGSQVQLQES
GPGLVRPSQTLSLTCTVSGYSITSDHAWSWVRQPPGRGLEWIGYISYSGITTYNPSLKSRVTISRDNSKNTLYLQMN
SLRAEDTAVYYCARSLARTTAMDYWGQGSLVTVSSASTKGPSVFPLAPSSKSTSGGTAALGCLVKDYFPEPVTVSWN
SGALTSGVHTFPAVLQSSGLYSLSSVVTVPSSSLGTQTYICNVNHKPSNTKVDKKVEPKSCDKTHTCPPCPAPELLG
GPSVFLFPPKPKDTLMISRTPEVTCVVVDVSHEDPEVKFNWYVDGVEVHNAKTKPREEQYQSTYRVVSVLTVLHQDW
LNGKEYKCKVSNKALPAPIEKTISKAKGQPREPQVYTLPPSREEMTKNQVSLTCLVKGFYPSDIAVEWESNGQPENN
YKTTPPVLDSDGSFFLYSKLTVDKSRWQQGNVFSCSVMHEALHNHYTQKSLSLSPGK]*
pLW080: LC IL6R 4792 1204
Nucleotide Sequence
[spacer (SEQ ID NO: 507)][pLW080 without spacer (SEQ ID NO: 515)]
(SEQ ID NO: 473)
[CAAGGCCAGTCTGGCCAG][TATGGGTCCTGCAGTTGGAACTATGTACACATATTCATGGATTGCGGCTCGAGCGG
TGGCAGCGGTGGCTCTGGTGGTCTGAGCGGCCGTTCCGATAATCATGGCGGCGGTTCTGACATCCAGATGACTCAGT
CTCCTAGCTCCCTGTCCGCCTCTGTGGGGGACCGAGTCACCATCACATGCAGAGCCAGCCAGGATATTTCTAGTTAC
CTGAACTGGTATCAGCAGAAGCCCGGAAAAGCACCTAAGCTGCTGATCTACTATACCTCCAGGCTGCACTCTGGCGT
GCCCAGTCGGTTCAGTGGCTCAGGGAGCGGAACCGACTTCACTTTTACCATCTCAAGCCTGCAGCCAGAGGATATTG
CCACATACTATTGTCAGCAGGGCAATACACTGCCCTACACTTTTGGCCAGGGGACCAAGGTGGAAATCAAACGTACG
GTGGCTGCACCATCTGTCTTCATCTTCCCGCCATCTGATGAGCAGTTGAAATCTGGAACTGCCTCTGTTGTGTGCCT
GCTGAATAACTTCTATCCCAGAGAGGCCAAAGTACAGTGGAAGGTGGATAACGCCCTCCAATCGGGTAACTCCCAGG
AGAGTGTCACAGAGCAGGACAGCAAGGACAGCACCTACAGCCTCAGCAGCACCCTGACGCTGAGCAAAGCAGACTAC
GAGAAACACAAAGTCTACGCCTGCGAAGTCACCCATCAGGGCCTGAGCTCGCCCGTCACAAAGAGCTTCAACAGGGG
AGAGTGTTAG]
Amino Acid Sequence
[spacer (SEQ ID NO: 87)][pLW080 without spacer (SEQ ID NO: 516)]
(SEQ ID NO: 474)
[QGQSGQ][YGSCSWNYVHIFMDCGSSGGSGGSGGLSGRSDNHGGGSDIQMTQSPSSLSASVGDRVTITCRASQDIS
SYLNWYQQKPGKAPKLLIYYTSRLHSGVPSRFSGSGSGTDFTFTISSLQPEDIATYYCQQGNTLPYTFGQGTKVEIK
RTVAAPSVFIFPPSDEQLKSGTASVVCLLNNFYPREAKVQWKVDNALQSGNSQESVTEQDSKDSTYSLSSTLTLSKA
DYEKHKVYACEVTHQGLSSPVTKSFNRGEC]*
CI048: Activated CI011
HC C225v5N297Q-*CD3LvHv-H-N
Nucleotide Sequence
(SEQ ID NO: 451)
CAAGGCCAGTCTGGCCAAATGATGTATTGCGGTGGGAATGAGGTGTTGTGCGGGCCGCGGGTTGGCTCGAGCGGTGG
CAGCGGTGGCTCTGGTGGTCTGAGCGGCCGTTCCGATAATCATGGCGGCGGTTCTCAGACCGTGGTCACACAGGAGC
CCTCACTGACAGTGAGCCCTGGCGGGACCGTCACACTGACTTGTCGCAGTTCAACTGGCGCCGTGACTACCAGCAAT
TACGCTAACTGGGTCCAGCAGAAACCAGGACAGGCACCACGAGGACTGATCGGAGGAACTAATAAGAGAGCACCAGG
AACCCCTGCAAGGTTCTCCGGATCTCTGCTGGGGGGAAAAGCCGCTCTGACACTGAGCGGCGTGCAGCCTGAGGACG
AAGCTGAGTACTATTGCGCACTGTGGTACTCCAACCTGTGGGTGTTTGGCGGGGGAACTAAGCTGACCGTCCTGGGA
GGAGGAGGAAGCGGAGGAGGAGGGAGCGGAGGAGGAGGATCCGAAGTGCAGCTGGTCGAGAGCGGAGGAGGACTGGT
GCAGCCAGGAGGATCCCTGAAGCTGTCTTGTGCAGCCAGTGGCTTCACCTTCAACACTTACGCAATGAACTGGGTGC
GGCAGGCACCTGGGAAGGGACTGGAATGGGTCGCCCGGATCAGATCTAAATACAATAACTATGCCACCTACTATGCT
GACAGTGTGAAGGATAGGTTCACCATTTCACGCGACGATAGCAAAAACACAGCTTATCTGCAGATGAATAACCTGAA
GACCGAGGATACAGCAGTGTACTATTGCGTCAGACACGGCAATTTCGGGAACTCTTACGTGAGTTGGTTTGCCTATT
GGGGACAGGGGACACTGGTCACCGTCTCCTCAGGAGGTGGTGGATCCCAGGTGCAGCTGAAACAGAGCGGCCCGGGC
CTGGTGCAGCCGAGCCAGAGCCTGAGCATTACCTGCACCGTGAGCGGCTTTAGCCTGACCAACTATGGCGTGCATTG
GGTGCGCCAGAGCCCGGGCAAAGGCCTGGAATGGCTGGGCGTGATTTGGAGCGGCGGCAACACCGATTATAACACCC
CGTTTACCAGCCGCCTGAGCATTAACAAAGATAACAGCAAAAGCCAGGTGTTTTTTAAAATGAACAGCCTGCAAAGC
CAGGATACCGCGATTTATTATTGCGCGCGCGCGCTGACCTATTATGATTATGAATTTGCGTATTGGGGCCAGGGCAC
CCTGGTGACCGTGAGCGCGGCTAGCACCAAGGGCCCATCGGTCTTCCCCCTGGCACCCTCCTCCAAGAGCACCTCTG
GGGGCACAGCGGCCCTGGGCTGCCTGGTCAAGGACTACTTCCCCGAACCGGTGACGGTGTCGTGGAACTCAGGCGCC
CTGACCAGCGGCGTGCACACCTTCCCGGCTGTCCTACAGTCCTCAGGACTCTACTCCCTCAGCAGCGTGGTGACCGT
GCCCTCCAGCAGCTTGGGCACCCAGACCTACATCTGCAACGTGAATCACAAGCCCAGCAACACCAAGGTGGACAAGA
AAGTTGAGCCCAAATCTTGTGACAAAACTCACACATGCCCACCGTGCCCAGCACCTGAACTCCTGGGGGGACCGTCA
GTCTTCCTCTTCCCCCCAAAACCCAAGGACACCCTCATGATCTCCCGGACCCCTGAGGTCACATGCGTGGTGGTGGA
CGTGAGCCACGAAGACCCTGAGGTCAAGTTCAACTGGTACGTGGACGGCGTGGAGGTGCATAATGCCAAGACAAAGC
CGCGGGAGGAGCAGTACCAGAGCACGTACCGTGTGGTCAGCGTCCTCACCGTCCTGCACCAGGACTGGCTGAATGGC
AAGGAGTACAAGTGCAAGGTCTCCAACAAAGCCCTCCCAGCCCCCATCGAGAAAACCATCTCCAAAGCCAAAGGGCA
GCCCCGAGAACCACAGGTGTACACCCTGCCCCCATCCCGGGAGGAGATGACCAAGAACCAGGTCAGCCTGACCTGCC
TGGTCAAAGGCTTCTATCCCAGCGACATCGCCGTGGAGTGGGAGAGCAATGGGCAGCCGGAGAACAACTACAAGACC
ACGCCTCCCGTGCTGGACTCCGACGGCTCCTTCTTCCTCTACAGCAAGCTCACCGTGGACAAGAGCAGGTGGCAGCA
GGGGAACGTCTTCTCATGCTCCGTGATGCATGAGGCTCTGCACAACCACTACACGCAGAAGAGCCTCTCCCTGTCTC
CGGGTAAATGA
Amino Acid Sequence
(SEQ ID NO: 452)
SDNHGGGSQTVVTQEPSLTVSPGGTVTLTCRSSTGAVTTSNYANWVQQKPGQAPRGLIGGTNKRAPGTPARFSGSLL
GGKAALTLSGVQPEDEAEYYCALWYSNLWVFGGGTKLTVLGGGGSGGGGSGGGGSEVQLVESGGGLVQPGGSLKLSC
AASGFTFNTYAMNWVRQAPGKGLEWVARIRSKYNNYATYYADSVKDRFTISRDDSKNTAYLQMNNLKTEDTAVYYCV
RHGNFGNSYVSWFAYWGQGTLVTVSSGGGGSQVQLKQSGPGLVQPSQSLSITCTVSGFSLTNYGVHWVRQSPGKGLE
WLGVIWSGGNTDYNTPFTSRLSINKDNSKSQVFFKMNSLQSQDTAIYYCARALTYYDYEFAYWGQGTLVTVSAASTK
GPSVFPLAPSSKSTSGGTAALGCLVKDYFPEPVTVSWNSGALTSGVHTFPAVLQSSGLYSLSSVVTVPSSSLGTQTY
ICNVNHKPSNTKVDKKVEPKSCDKTHTCPPCPAPELLGGPSVFLFPPKPKDTLMISRTPEVTCVVVDVSHEDPEVKF
NWYVDGVEVHNAKTKPREEQYQSTYRVVSVLTVLHQDWLNGKEYKCKVSNKALPAPIEKTISKAKGQPREPQVYTLP
PSREEMTKNQVSLTCLVKGFYPSDIAVEWESNGQPENNYKTTPPVLDSDGSFFLYSKLTVDKSRWQQGNVFSCSVMH
EALHNHYTQKSLSLSPGK
Activated Light Chain
Nucleotide Sequence
(SEQ ID NO: 483)
TCCGATAATCATGGCAGTAGCGGTACCCAGATCTTGCTGACCCAGAGCCCGGTGATTCTGAGCGTGAGCCCGGGCGA
ACGTGTGAGCTTTAGCTGCCGCGCGAGCCAGAGCATTGGCACCAACATTCATTGGTATCAGCAGCGCACCAACGGCA
GCCCGCGCCTGCTGATTAAATATGCGAGCGAAAGCATTAGCGGCATTCCGAGCCGCTTTAGCGGCAGCGGCAGCGGC
ACCGATTTTACCCTGAGCATTAACAGCGTGGAAAGCGAAGATATTGCGGATTATTATTGCCAGCAGAACAACAACTG
GCCGACCACCTTTGGCGCGGGCACCAAACTGGAACTGAAACGTACGGTGGCTGCACCATCTGTCTTCATCTTCCCGC
CATCTGATGAGCAGTTGAAATCTGGAACTGCCTCTGTTGTGTGCCTGCTGAATAACTTCTATCCCAGAGAGGCCAAA
GTACAGTGGAAGGTGGATAACGCCCTCCAATCGGGTAACTCCCAGGAGAGTGTCACAGAGCAGGACAGCAAGGACAG
CACCTACAGCCTCAGCAGCACCCTGACGCTGAGCAAAGCAGACTACGAGAAACACAAAGTCTACGCCTGCGAAGTCA
CCCATCAGGGCCTGAGCTCGCCCGTCACAAAGAGCTTCAACAGGGGAGAGTGTTAG
Amino Acid Sequence
(SEQ ID NO: 484)
SDNHGSSGTQILLTQSPVILSVSPGERVSFSCRASQSIGTNIHWYQQRTNGSPRLLIKYASESISGIPSRFSGSGSG
TDFTLSINSVESEDIADYYCQQNNNWPTTFGAGTKLELKRTVAAPSVFIFPPSDEQLKSGTASVVCLLNNFYPREAK
VQWKVDNALQSGNSQESVTEQDSKDSTYSLSSTLTLSKADYEKHKVYACEVTHQGLSSPVTKSFNRGEC
CI052: C225v5N297Q-mCD3-H-N
pLW100: HC C225v5N297Q-mCD3-H-N
Nucleotide Sequence
(SEQ ID NO: 491)
GAAGTGCAGCTGGTGGAATCTGGGGGCGGACTGGTGCAGCCTGGCAAGTCTCTGAAGCTGAGCTGCGAGGCCAGCGG
CTTCACCTTTAGCGGCTACGGCATGCACTGGGTGCGCCAGGCACCTGGCAGAGGCCTGGAAAGCGTGGCCTACATCA
CCAGCAGCAGCATCAACATTAAGTACGCCGACGCCGTGAAGGGCCGGTTCACCGTGTCCAGAGACAACGCCAAGAAC
CTGCTGTTCCTGCAGATGAACATCCTGAAGTCCGAGGACACCGCCATGTACTACTGCGCCAGATTCGACTGGGACAA
GAACTACTGGGGCCAGGGCACAATGGTCACAGTGTCCAGCGGTGGAGGTGGTAGTGGTGGAGGAAGTGGAGGTTCAG
GAGGTGGAAGCGGTGGTGGTGGTAGTGACATCCAGATGACCCAGAGCCCCAGCAGCCTGCCTGCCTCTCTGGGCGAT
AGAGTGACCATCAACTGCCAGGCCAGCCAGGACATCAGCAACTACCTGAACTGGTATCAGCAGAAGCCCGGCAAGGC
CCCCAAGCTGCTGATCTACTACACCAACAAGCTGGCCGACGGTGTGCCCAGCAGATTCAGCGGCAGCGGTAGCGGCA
GAGACAGCAGCTTCACCATCAGCTCCCTGGAATCCGAGGATATCGGCAGCTACTACTGCCAGCAGTACTACAACTAC
CCCTGGACCTTCGGCCCTGGCACCAAGCTGGAAATCAAAAGAGGAGGTGGTGGATCCCAGGTGCAGCTGAAACAGAG
CGGCCCGGGCCTGGTGCAGCCGAGCCAGAGCCTGAGCATTACCTGCACCGTGAGCGGCTTTAGCCTGACCAACTATG
GCGTGCATTGGGTGCGCCAGAGCCCGGGCAAAGGCCTGGAATGGCTGGGCGTGATTTGGAGCGGCGGCAACACCGAT
TATAACACCCCGTTTACCAGCCGCCTGAGCATTAACAAAGATAACAGCAAAAGCCAGGTGTTTTTTAAAATGAACAG
CCTGCAAAGCCAGGATACCGCGATTTATTATTGCGCGCGCGCGCTGACCTATTATGATTATGAATTTGCGTATTGGG
GCCAGGGCACCCTGGTGACCGTGAGCGCGGCTAGCACCAAGGGCCCATCGGTCTTCCCCCTGGCACCCTCCTCCAAG
AGCACCTCTGGGGGCACAGCGGCCCTGGGCTGCCTGGTCAAGGACTACTTCCCCGAACCGGTGACGGTGTCGTGGAA
CTCAGGCGCCCTGACCAGCGGCGTGCACACCTTCCCGGCTGTCCTACAGTCCTCAGGACTCTACTCCCTCAGCAGCG
TGGTGACCGTGCCCTCCAGCAGCTTGGGCACCCAGACCTACATCTGCAACGTGAATCACAAGCCCAGCAACACCAAG
GTGGACAAGAAAGTTGAGCCCAAATCTTGTGACAAAACTCACACATGCCCACCGTGCCCAGCACCTGAACTCCTGGG
GGGACCGTCAGTCTTCCTCTTCCCCCCAAAACCCAAGGACACCCTCATGATCTCCCGGACCCCTGAGGTCACATGCG
TGGTGGTGGACGTGAGCCACGAAGACCCTGAGGTCAAGTTCAACTGGTACGTGGACGGCGTGGAGGTGCATAATGCC
AAGACAAAGCCGCGGGAGGAGCAGTACCAGAGCACGTACCGTGTGGTCAGCGTCCTCACCGTCCTGCACCAGGACTG
GCTGAATGGCAAGGAGTACAAGTGCAAGGTCTCCAACAAAGCCCTCCCAGCCCCCATCGAGAAAACCATCTCCAAAG
CCAAAGGGCAGCCCCGAGAACCACAGGTGTACACCCTGCCCCCATCCCGGGAGGAGATGACCAAGAACCAGGTCAGC
CTGACCTGCCTGGTCAAAGGCTTCTATCCCAGCGACATCGCCGTGGAGTGGGAGAGCAATGGGCAGCCGGAGAACAA
CTACAAGACCACGCCTCCCGTGCTGGACTCCGACGGCTCCTTCTTCCTCTACAGCAAGCTCACCGTGGACAAGAGCA
GGTGGCAGCAGGGGAACGTCTTCTCATGCTCCGTGATGCATGAGGCTCTGCACAACCACTACACGCAGAAGAGCCTC
TCCCTGTCTCCGGGTAAATGA
Amino Acid Sequence
(SEQ ID NO: 492)
EVQLVESGGGLVQPGKSLKLSCEASGFTFSGYGMHWVRQAPGRGLESVAYITSSSINIKYADAVKGRFTVSRDNAKN
LLFLQMNILKSEDTAMYYCARFDWDKNYWGQGTMVTVSSGGGGSGGGSGGSGGGSGGGGSDIQMTQSPSSLPASLGD
RVTINCQASQDISNYLNWYQQKPGKAPKLLIYYTNKLADGVPSRFSGSGSGRDSSFTISSLESEDIGSYYCQQYYNY
PWTFGPGTKLEIKRGGGGSQVQLKQSGPGLVQPSQSLSITCTVSGFSLTNYGVHWVRQSPGKGLEWLGVIWSGGNTD
YNTPFTSRLSINKDNSKSQVFFKMNSLQSQDTAIYYCARALTYYDYEFAYWGQGTLVTVSAASTKGPSVFPLAPSSK
STSGGTAALGCLVKDYFPEPVTVSWNSGALTSGVHTFPAVLQSSGLYSLSSVVTVPSSSLGTQTYICNVNHKPSNTK
VDKKVEPKSCDKTHTCPPCPAPELLGGPSVFLFPPKPKDTLMISRTPEVTCVVVDVSHEDPEVKFNWYVDGVEVHNA
KTKPREEQYQSTYRVVSVLTVLHQDWLNGKEYKCKVSNKALPAPIEKTISKAKGQPREPQVYTLPPSREEMTKNQVS
LTCLVKGFYPSDIAVEWESNGQPENNYKTTPPVLDSDGSFFLYSKLTVDKSRWQQGNVFSCSVMHEALHNHYTQKSL
SLSPGK*
OPP021: LC C225
Nucleotide Sequence
(SEQ ID NO: 457)
GATATCTTGCTGACCCAGAGCCCGGTGATTCTGAGCGTGAGCCCGGGCGAACGTGTGAGCTTTAGCTGCCGCGCGAG
CCAGAGCATTGGCACCAACATTCATTGGTATCAGCAGCGCACCAACGGCAGCCCGCGCCTGCTGATTAAATATGCGA
GCGAAAGCATTAGCGGCATTCCGAGCCGCTTTAGCGGCAGCGGCAGCGGCACCGATTTTACCCTGAGCATTAACAGC
GTGGAAAGCGAAGATATTGCGGATTATTATTGCCAGCAGAACAACAACTGGCCGACCACCTTTGGCGCGGGCACCAA
ACTGGAAATCAAACGTACGGTGGCTGCACCATCTGTCTTCATCTTCCCGCCATCTGATGAGCAGTTGAAATCTGGAA
CTGCCTCTGTTGTGTGCCTGCTGAATAACTTCTATCCCAGAGAGGCCAAAGTACAGTGGAAGGTGGATAACGCCCTC
CAATCGGGTAACTCCCAGGAGAGTGTCACAGAGCAGGACAGCAAGGACAGCACCTACAGCCTCAGCAGCACCCTGAC
GCTGAGCAAAGCAGACTACGAGAAACACAAAGTCTACGCCTGCGAAGTCACCCATCAGGGCCTGAGCTCGCCCGTCA
CAAAGAGCTTCAACAGGGGAGAGTGTTAG
Amino Acid Sequence
(SEQ ID NO: 458)
DILLTQSPVILSVSPGERVSFSCRASQSIGTNIHWYQQRTNGSPRLLIKYASESISGIPSRFSGSGSGTDFTLSINS
VESEDIADYYCQQNNNWPTTFGAGTKLEIKRTVAAPSVFIFPPSDEQLKSGTASVVCLLNNFYPREAKVQWKVDNAL
QSGNSQESVTEQDSKDSTYSLSSTLTLSKADYEKHKVYACEVTHQGLSSPVTKSFNRGEC*
CI053: 3954-1204-C225v5N297Q-MC01-2001-mCD3-H-N
pLW117: HC C225v5N297Q-MC01-2001-mCD3-H-N
Nucleotide Sequence
[spacer (SEQ ID NO: 507)][pLW117 without spacer (SEQ ID NO: 531)]
(SEQ ID NO: 493)
[CAAGGCCAGTCTGGCCAA][TTGCATCCTATGTGCCATCCTGAGGGTCTGTGCAAGTTTACTCCTGGAGGTGGCTC
GAGCGGTGGCAGCGGTGGCTCTGGTGGTATTAGCAGTGGTCTGTTAAGCGGTCGTAGCGATAATCATGGCGGCGGTT
CTGAAGTGCAGCTGGTGGAATCTGGGGGCGGACTGGTGCAGCCTGGCAAGTCTCTGAAGCTGAGCTGCGAGGCCAGC
GGCTTCACCTTTAGCGGCTACGGCATGCACTGGGTGCGCCAGGCACCTGGCAGAGGCCTGGAAAGCGTGGCCTACAT
CACCAGCAGCAGCATCAACATTAAGTACGCCGACGCCGTGAAGGGCCGGTTCACCGTGTCCAGAGACAACGCCAAGA
ACCTGCTGTTCCTGCAGATGAACATCCTGAAGTCCGAGGACACCGCCATGTACTACTGCGCCAGATTCGACTGGGAC
AAGAACTACTGGGGCCAGGGCACAATGGTCACAGTGTCCAGCGGTGGAGGTGGTAGTGGTGGAGGAAGTGGAGGTTC
AGGAGGTGGAAGCGGTGGTGGTGGTAGTGACATCCAGATGACCCAGAGCCCCAGCAGCCTGCCTGCCTCTCTGGGCG
ATAGAGTGACCATCAACTGCCAGGCCAGCCAGGACATCAGCAACTACCTGAACTGGTATCAGCAGAAGCCCGGCAAG
GCCCCCAAGCTGCTGATCTACTACACCAACAAGCTGGCCGACGGTGTGCCCAGCAGATTCAGCGGCAGCGGTAGCGG
CAGAGACAGCAGCTTCACCATCAGCTCCCTGGAATCCGAGGATATCGGCAGCTACTACTGCCAGCAGTACTACAACT
ACCCCTGGACCTTCGGCCCTGGCACCAAGCTGGAAATCAAAAGAGGAGGTGGTGGATCCCAGGTGCAGCTGAAACAG
AGCGGCCCGGGCCTGGTGCAGCCGAGCCAGAGCCTGAGCATTACCTGCACCGTGAGCGGCTTTAGCCTGACCAACTA
TGGCGTGCATTGGGTGCGCCAGAGCCCGGGCAAAGGCCTGGAATGGCTGGGCGTGATTTGGAGCGGCGGCAACACCG
ATTATAACACCCCGTTTACCAGCCGCCTGAGCATTAACAAAGATAACAGCAAAAGCCAGGTGTTTTTTAAAATGAAC
AGCCTGCAAAGCCAGGATACCGCGATTTATTATTGCGCGCGCGCGCTGACCTATTATGATTATGAATTTGCGTATTG
GGGCCAGGGCACCCTGGTGACCGTGAGCGCGGCTAGCACCAAGGGCCCATCGGTCTTCCCCCTGGCACCCTCCTCCA
AGAGCACCTCTGGGGGCACAGCGGCCCTGGGCTGCCTGGTCAAGGACTACTTCCCCGAACCGGTGACGGTGTCGTGG
AACTCAGGCGCCCTGACCAGCGGCGTGCACACCTTCCCGGCTGTCCTACAGTCCTCAGGACTCTACTCCCTCAGCAG
CGTGGTGACCGTGCCCTCCAGCAGCTTGGGCACCCAGACCTACATCTGCAACGTGAATCACAAGCCCAGCAACACCA
AGGTGGACAAGAAAGTTGAGCCCAAATCTTGTGACAAAACTCACACATGCCCACCGTGCCCAGCACCTGAACTCCTG
GGGGGACCGTCAGTCTTCCTCTTCCCCCCAAAACCCAAGGACACCCTCATGATCTCCCGGACCCCTGAGGTCACATG
CGTGGTGGTGGACGTGAGCCACGAAGACCCTGAGGTCAAGTTCAACTGGTACGTGGACGGCGTGGAGGTGCATAATG
CCAAGACAAAGCCGCGGGAGGAGCAGTACCAGAGCACGTACCGTGTGGTCAGCGTCCTCACCGTCCTGCACCAGGAC
TGGCTGAATGGCAAGGAGTACAAGTGCAAGGTCTCCAACAAAGCCCTCCCAGCCCCCATCGAGAAAACCATCTCCAA
AGCCAAAGGGCAGCCCCGAGAACCACAGGTGTACACCCTGCCCCCATCCCGGGAGGAGATGACCAAGAACCAGGTCA
GCCTGACCTGCCTGGTCAAAGGCTTCTATCCCAGCGACATCGCCGTGGAGTGGGAGAGCAATGGGCAGCCGGAGAAC
AACTACAAGACCACGCCTCCCGTGCTGGACTCCGACGGCTCCTTCTTCCTCTACAGCAAGCTCACCGTGGACAAGAG
CAGGTGGCAGCAGGGGAACGTCTTCTCATGCTCCGTGATGCATGAGGCTCTGCACAACCACTACACGCAGAAGAGCC
TCTCCCTGTCTCCGGGTAAATGA]
Amino Acid Sequence
[spacer (SEQ ID NO: 87)][pLW117 without spacer (SEQ ID NO: 532)]
(SEQ ID NO: 494)
[QGQSGQ][LHPMCHPEGLCKFTPGGGSSGGSGGSGGISSGLLSGRSDNHGGGSEVQLVESGGGLVQPGKSLKLSCE
ASGFTFSGYGMHWVRQAPGRGLESVAYITSSSINIKYADAVKGRFTVSRDNAKNLLFLQMNILKSEDTAMYYCARFD
WDKNYWGQGTMVTVSSGGGGSGGGSGGSGGGSGGGGSDIQMTQSPSSLPASLGDRVTINCQASQDISNYLNWYQQKP
GKAPKLLIYYTNKLADGVPSRFSGSGSGRDSSFTISSLESEDIGSYYCQQYYNYPWTFGPGTKLEIKRGGGGSQVQL
KQSGPGLVQPSQSLSITCTVSGFSLTNYGVHWVRQSPGKGLEWLGVIWSGGNTDYNTPFTSRLSINKDNSKSQVFFK
MNSLQSQDTAIYYCARALTYYDYEFAYWGQGTLVTVSAASTKGPSVFPLAPSSKSTSGGTAALGCLVKDYFPEPVTV
SWNSGALTSGVHTFPAVLQSSGLYSLSSVVTVPSSSLGTQTYICNVNHKPSNTKVDKKVEPKSCDKTHTCPPCPAPE
LLGGPSVFLFPPKPKDTLMISRTPEVTCVVVDVSHEDPEVKFNWYVDGVEVHNAKTKPREEQYQSTYRVVSVLTVLH
QDWLNGKEYKCKVSNKALPAPIEKTISKAKGQPREPQVYTLPPSREEMTKNQVSLTCLVKGFYPSDIAVEWESNGQP
ENNYKTTPPVLDSDGSFFLYSKLTVDKSRWQQGNVFSCSVMHEALHNHYTQKSLSLSPGK]*
OPP022: LC C225 3954-1204
Nucleotide Sequence
[spacer (SEQ ID NO: 507)][OPP022 without spacer (SEQ ID NO: 509)]
(SEQ ID NO: 449)
[CAAGGCCAGTCTGGCCAG][TGCATCTCACCTCGTGGTTGTCCGGACGGCCCATACGTCATGTACGGCTCGAGCGG
TGGCAGCGGTGGCTCTGGTGGATCCGGTCTGAGCGGCCGTTCCGATAATCATGGCAGTAGCGGTACCCAGATCTTGC
TGACCCAGAGCCCGGTGATTCTGAGCGTGAGCCCGGGCGAACGTGTGAGCTTTAGCTGCCGCGCGAGCCAGAGCATT
GGCACCAACATTCATTGGTATCAGCAGCGCACCAACGGCAGCCCGCGCCTGCTGATTAAATATGCGAGCGAAAGCAT
TAGCGGCATTCCGAGCCGCTTTAGCGGCAGCGGCAGCGGCACCGATTTTACCCTGAGCATTAACAGCGTGGAAAGCG
AAGATATTGCGGATTATTATTGCCAGCAGAACAACAACTGGCCGACCACCTTTGGCGCGGGCACCAAACTGGAACTG
AAACGTACGGTGGCTGCACCATCTGTCTTCATCTTCCCGCCATCTGATGAGCAGTTGAAATCTGGAACTGCCTCTGT
TGTGTGCCTGCTGAATAACTTCTATCCCAGAGAGGCCAAAGTACAGTGGAAGGTGGATAACGCCCTCCAATCGGGTA
ACTCCCAGGAGAGTGTCACAGAGCAGGACAGCAAGGACAGCACCTACAGCCTCAGCAGCACCCTGACGCTGAGCAAA
GCAGACTACGAGAAACACAAAGTCTACGCCTGCGAAGTCACCCATCAGGGCCTGAGCTCGCCCGTCACAAAGAGCTT
CAACAGGGGAGAGTGTTAG]
Amino Acid Sequence
[spacer (SEQ ID NO: 87)][OPP022 without spacer (SEQ ID NO: 508)]
(SEQ ID NO: 450)
[QGQSGQ][CISPRGCPDGPYVMYGSSGGSGGSGGSGLSGRSDNHGSSGTQILLTQSPVILSVSPGERVSFSCRASQ
SIGTNIHWYQQRTNGSPRLLIKYASESISGIPSRFSGSGSGTDFTLSINSVESEDIADYYCQQNNNWPTTFGAGTKL
ELKRTVAAPSVFIFPPSDEQLKSGTASVVCLLNNFYPREAKVQWKVDNALQSGNSQESVTEQDSKDSTYSLSSTLTL
SKADYEKHKVYACEVTHQGLSSPVTKSFNRGEC]*
CI054: 3954-1204-C225v5N297Q-MCO2-2001-mCD3-H-N
pLW118: HC C225v5N297Q-MCO2-2001-mCD3-H-N
Nucleotide Sequence
[spacer (SEQ ID NO: 521)][pLW118 without spacer (SEQ ID NO: 533)]
(SEQ ID NO: 495)
[CAAGGCCAGTCTGGCCAAGGT][GCTTGCTCTGATATGGTTTATTGGGGTTCGTGCAGTTGGTTGGGAGGTGGCTC
GAGCGGTGGCAGCGGTGGCTCTGGTGGTATTAGCAGTGGTCTGTTAAGCGGTCGTAGCGATAATCATGGCGGCGGTT
CTGAAGTGCAGCTGGTGGAATCTGGGGGCGGACTGGTGCAGCCTGGCAAGTCTCTGAAGCTGAGCTGCGAGGCCAGC
GGCTTCACCTTTAGCGGCTACGGCATGCACTGGGTGCGCCAGGCACCTGGCAGAGGCCTGGAAAGCGTGGCCTACAT
CACCAGCAGCAGCATCAACATTAAGTACGCCGACGCCGTGAAGGGCCGGTTCACCGTGTCCAGAGACAACGCCAAGA
ACCTGCTGTTCCTGCAGATGAACATCCTGAAGTCCGAGGACACCGCCATGTACTACTGCGCCAGATTCGACTGGGAC
AAGAACTACTGGGGCCAGGGCACAATGGTCACAGTGTCCAGCGGTGGAGGTGGTAGTGGTGGAGGAAGTGGAGGTTC
AGGAGGTGGAAGCGGTGGTGGTGGTAGTGACATCCAGATGACCCAGAGCCCCAGCAGCCTGCCTGCCTCTCTGGGCG
ATAGAGTGACCATCAACTGCCAGGCCAGCCAGGACATCAGCAACTACCTGAACTGGTATCAGCAGAAGCCCGGCAAG
GCCCCCAAGCTGCTGATCTACTACACCAACAAGCTGGCCGACGGTGTGCCCAGCAGATTCAGCGGCAGCGGTAGCGG
CAGAGACAGCAGCTTCACCATCAGCTCCCTGGAATCCGAGGATATCGGCAGCTACTACTGCCAGCAGTACTACAACT
ACCCCTGGACCTTCGGCCCTGGCACCAAGCTGGAAATCAAAAGAGGAGGTGGTGGATCCCAGGTGCAGCTGAAACAG
AGCGGCCCGGGCCTGGTGCAGCCGAGCCAGAGCCTGAGCATTACCTGCACCGTGAGCGGCTTTAGCCTGACCAACTA
TGGCGTGCATTGGGTGCGCCAGAGCCCGGGCAAAGGCCTGGAATGGCTGGGCGTGATTTGGAGCGGCGGCAACACCG
ATTATAACACCCCGTTTACCAGCCGCCTGAGCATTAACAAAGATAACAGCAAAAGCCAGGTGTTTTTTAAAATGAAC
AGCCTGCAAAGCCAGGATACCGCGATTTATTATTGCGCGCGCGCGCTGACCTATTATGATTATGAATTTGCGTATTG
GGGCCAGGGCACCCTGGTGACCGTGAGCGCGGCTAGCACCAAGGGCCCATCGGTCTTCCCCCTGGCACCCTCCTCCA
AGAGCACCTCTGGGGGCACAGCGGCCCTGGGCTGCCTGGTCAAGGACTACTTCCCCGAACCGGTGACGGTGTCGTGG
AACTCAGGCGCCCTGACCAGCGGCGTGCACACCTTCCCGGCTGTCCTACAGTCCTCAGGACTCTACTCCCTCAGCAG
CGTGGTGACCGTGCCCTCCAGCAGCTTGGGCACCCAGACCTACATCTGCAACGTGAATCACAAGCCCAGCAACACCA
AGGTGGACAAGAAAGTTGAGCCCAAATCTTGTGACAAAACTCACACATGCCCACCGTGCCCAGCACCTGAACTCCTG
GGGGGACCGTCAGTCTTCCTCTTCCCCCCAAAACCCAAGGACACCCTCATGATCTCCCGGACCCCTGAGGTCACATG
CGTGGTGGTGGACGTGAGCCACGAAGACCCTGAGGTCAAGTTCAACTGGTACGTGGACGGCGTGGAGGTGCATAATG
CCAAGACAAAGCCGCGGGAGGAGCAGTACCAGAGCACGTACCGTGTGGTCAGCGTCCTCACCGTCCTGCACCAGGAC
TGGCTGAATGGCAAGGAGTACAAGTGCAAGGTCTCCAACAAAGCCCTCCCAGCCCCCATCGAGAAAACCATCTCCAA
AGCCAAAGGGCAGCCCCGAGAACCACAGGTGTACACCCTGCCCCCATCCCGGGAGGAGATGACCAAGAACCAGGTCA
GCCTGACCTGCCTGGTCAAAGGCTTCTATCCCAGCGACATCGCCGTGGAGTGGGAGAGCAATGGGCAGCCGGAGAAC
AACTACAAGACCACGCCTCCCGTGCTGGACTCCGACGGCTCCTTCTTCCTCTACAGCAAGCTCACCGTGGACAAGAG
CAGGTGGCAGCAGGGGAACGTCTTCTCATGCTCCGTGATGCATGAGGCTCTGCACAACCACTACACGCAGAAGAGCC
TCTCCCTGTCTCCGGGTAAATGA]
Amino Acid Sequence
[spacer (SEQ ID NO: 407)][pLW118 without spacer (SEQ ID NO: 534)]
(SEQ ID NO: 496)
[QGQSGQG][ACSDMVYWGSCSWLGGGSSGGSGGSGGISSGLLSGRSDNHGGGSEVQLVESGGGLVQPGKSLKLSCE
ASGFTFSGYGMHWVRQAPGRGLESVAYITSSSINIKYADAVKGRFTVSRDNAKNLLFLQMNILKSEDTAMYYCARFD
WDKNYWGQGTMVTVSSGGGGSGGGSGGSGGGSGGGGSDIQMTQSPSSLPASLGDRVTINCQASQDISNYLNWYQQKP
GKAPKLLIYYTNKLADGVPSRFSGSGSGRDSSFTISSLESEDIGSYYCQQYYNYPWTFGPGTKLEIKRGGGGSQVQL
KQSGPGLVQPSQSLSITCTVSGFSLTNYGVHWVRQSPGKGLEWLGVIWSGGNTDYNTPFTSRLSINKDNSKSQVFFK
MNSLQSQDTAIYYCARALTYYDYEFAYWGQGTLVTVSAASTKGPSVFPLAPSSKSTSGGTAALGCLVKDYFPEPVTV
SWNSGALTSGVHTFPAVLQSSGLYSLSSVVTVPSSSLGTQTYICNVNHKPSNTKVDKKVEPKSCDKTHTCPPCPAPE
LLGGPSVFLFPPKPKDTLMISRTPEVTCVVVDVSHEDPEVKFNWYVDGVEVHNAKTKPREEQYQSTYRVVSVLTVLH
QDWLNGKEYKCKVSNKALPAPIEKTISKAKGQPREPQVYTLPPSREEMTKNQVSLTCLVKGFYPSDIAVEWESNGQP
ENNYKTTPPVLDSDGSFFLYSKLTVDKSRWQQGNVFSCSVMHEALHNHYTQKSLSLSPGK]*
OPP022: LC C225 3954-1204
Nucleotide Sequence
[spacer (SEQ ID NO: 507)][OPP022 without spacer (SEQ ID NO: 509)]
(SEQ ID NO: 449)
[CAAGGCCAGTCTGGCCAG][TGCATCTCACCTCGTGGTTGTCCGGACGGCCCATACGTCATGTACGGCTCGAGCGG
TGGCAGCGGTGGCTCTGGTGGATCCGGTCTGAGCGGCCGTTCCGATAATCATGGCAGTAGCGGTACCCAGATCTTGC
TGACCCAGAGCCCGGTGATTCTGAGCGTGAGCCCGGGCGAACGTGTGAGCTTTAGCTGCCGCGCGAGCCAGAGCATT
GGCACCAACATTCATTGGTATCAGCAGCGCACCAACGGCAGCCCGCGCCTGCTGATTAAATATGCGAGCGAAAGCAT
TAGCGGCATTCCGAGCCGCTTTAGCGGCAGCGGCAGCGGCACCGATTTTACCCTGAGCATTAACAGCGTGGAAAGCG
AAGATATTGCGGATTATTATTGCCAGCAGAACAACAACTGGCCGACCACCTTTGGCGCGGGCACCAAACTGGAACTG
AAACGTACGGTGGCTGCACCATCTGTCTTCATCTTCCCGCCATCTGATGAGCAGTTGAAATCTGGAACTGCCTCTGT
TGTGTGCCTGCTGAATAACTTCTATCCCAGAGAGGCCAAAGTACAGTGGAAGGTGGATAACGCCCTCCAATCGGGTA
ACTCCCAGGAGAGTGTCACAGAGCAGGACAGCAAGGACAGCACCTACAGCCTCAGCAGCACCCTGACGCTGAGCAAA
GCAGACTACGAGAAACACAAAGTCTACGCCTGCGAAGTCACCCATCAGGGCCTGAGCTCGCCCGTCACAAAGAGCTT
CAACAGGGGAGAGTGTTAG]
Amino Acid Sequence
[spacer (SEQ ID NO: 87)][OPP022 without spacer (SEQ ID NO: 508)]
(SEQ ID NO: 450)
[QGQSGQ][CISPRGCPDGPYVMYGSSGGSGGSGGSGLSGRSDNHGSSGTQILLTQSPVILSVSPGERVSFSCRASQ
SIGTNIHWYQQRTNGSPRLLIKYASESISGIPSRFSGSGSGTDFTLSINSVESEDIADYYCQQNNNWPTTFGAGTKL
ELKRTVAAPSVFIFPPSDEQLKSGTASVVCLLNNFYPREAKVQWKVDNALQSGNSQESVTEQDSKDSTYSLSSTLTL
SKADYEKHKVYACEVTHQGLSSPVTKSFNRGEC]*
CI055: 3954-1204-C225v5N297Q-MC03-2001-mCD3-H-N
pLW119: HC C225v5N297Q-MC03-2001-mCD3-H-N
Nucleotide Sequence
[spacer (SEQ ID NO: 507)][pLW119 without spacer (SEQ ID NO: 535)]
(SEQ ID NO: 497)
[CAAGGCCAGTCTGGCCAA][GATTGCATTGGATTGGATCATTATTTTCTTGGACCGTGCAGTTCTGGAGGTGGCTC
GAGCGGTGGCAGCGGTGGCTCTGGTGGTATTAGCAGTGGTCTGTTAAGCGGTCGTAGCGATAATCATGGCGGCGGTT
CTGAAGTGCAGCTGGTGGAATCTGGGGGCGGACTGGTGCAGCCTGGCAAGTCTCTGAAGCTGAGCTGCGAGGCCAGC
GGCTTCACCTTTAGCGGCTACGGCATGCACTGGGTGCGCCAGGCACCTGGCAGAGGCCTGGAAAGCGTGGCCTACAT
CACCAGCAGCAGCATCAACATTAAGTACGCCGACGCCGTGAAGGGCCGGTTCACCGTGTCCAGAGACAACGCCAAGA
ACCTGCTGTTCCTGCAGATGAACATCCTGAAGTCCGAGGACACCGCCATGTACTACTGCGCCAGATTCGACTGGGAC
AAGAACTACTGGGGCCAGGGCACAATGGTCACAGTGTCCAGCGGTGGAGGTGGTAGTGGTGGAGGAAGTGGAGGTTC
AGGAGGTGGAAGCGGTGGTGGTGGTAGTGACATCCAGATGACCCAGAGCCCCAGCAGCCTGCCTGCCTCTCTGGGCG
ATAGAGTGACCATCAACTGCCAGGCCAGCCAGGACATCAGCAACTACCTGAACTGGTATCAGCAGAAGCCCGGCAAG
GCCCCCAAGCTGCTGATCTACTACACCAACAAGCTGGCCGACGGTGTGCCCAGCAGATTCAGCGGCAGCGGTAGCGG
CAGAGACAGCAGCTTCACCATCAGCTCCCTGGAATCCGAGGATATCGGCAGCTACTACTGCCAGCAGTACTACAACT
ACCCCTGGACCTTCGGCCCTGGCACCAAGCTGGAAATCAAAAGAGGAGGTGGTGGATCCCAGGTGCAGCTGAAACAG
AGCGGCCCGGGCCTGGTGCAGCCGAGCCAGAGCCTGAGCATTACCTGCACCGTGAGCGGCTTTAGCCTGACCAACTA
TGGCGTGCATTGGGTGCGCCAGAGCCCGGGCAAAGGCCTGGAATGGCTGGGCGTGATTTGGAGCGGCGGCAACACCG
ATTATAACACCCCGTTTACCAGCCGCCTGAGCATTAACAAAGATAACAGCAAAAGCCAGGTGTTTTTTAAAATGAAC
AGCCTGCAAAGCCAGGATACCGCGATTTATTATTGCGCGCGCGCGCTGACCTATTATGATTATGAATTTGCGTATTG
GGGCCAGGGCACCCTGGTGACCGTGAGCGCGGCTAGCACCAAGGGCCCATCGGTCTTCCCCCTGGCACCCTCCTCCA
AGAGCACCTCTGGGGGCACAGCGGCCCTGGGCTGCCTGGTCAAGGACTACTTCCCCGAACCGGTGACGGTGTCGTGG
AACTCAGGCGCCCTGACCAGCGGCGTGCACACCTTCCCGGCTGTCCTACAGTCCTCAGGACTCTACTCCCTCAGCAG
CGTGGTGACCGTGCCCTCCAGCAGCTTGGGCACCCAGACCTACATCTGCAACGTGAATCACAAGCCCAGCAACACCA
AGGTGGACAAGAAAGTTGAGCCCAAATCTTGTGACAAAACTCACACATGCCCACCGTGCCCAGCACCTGAACTCCTG
GGGGGACCGTCAGTCTTCCTCTTCCCCCCAAAACCCAAGGACACCCTCATGATCTCCCGGACCCCTGAGGTCACATG
CGTGGTGGTGGACGTGAGCCACGAAGACCCTGAGGTCAAGTTCAACTGGTACGTGGACGGCGTGGAGGTGCATAATG
CCAAGACAAAGCCGCGGGAGGAGCAGTACCAGAGCACGTACCGTGTGGTCAGCGTCCTCACCGTCCTGCACCAGGAC
TGGCTGAATGGCAAGGAGTACAAGTGCAAGGTCTCCAACAAAGCCCTCCCAGCCCCCATCGAGAAAACCATCTCCAA
AGCCAAAGGGCAGCCCCGAGAACCACAGGTGTACACCCTGCCCCCATCCCGGGAGGAGATGACCAAGAACCAGGTCA
GCCTGACCTGCCTGGTCAAAGGCTTCTATCCCAGCGACATCGCCGTGGAGTGGGAGAGCAATGGGCAGCCGGAGAAC
AACTACAAGACCACGCCTCCCGTGCTGGACTCCGACGGCTCCTTCTTCCTCTACAGCAAGCTCACCGTGGACAAGAG
CAGGTGGCAGCAGGGGAACGTCTTCTCATGCTCCGTGATGCATGAGGCTCTGCACAACCACTACACGCAGAAGAGCC
TCTCCCTGTCTCCGGGTAAATGA]
Amino Acid Sequence
[spacer (SEQ ID NO: 87)][pLW119 without spacer (SEQ ID NO: 536)]
(SEQ ID NO: 498)
[QGQSGQ][DCIGLDHYFLGPCSSGGGSSGGSGGSGGISSGLLSGRSDNHGGGSEVQLVESGGGLVQPGKSLKLSCE
ASGFTFSGYGMHWVRQAPGRGLESVAYITSSSINIKYADAVKGRFTVSRDNAKNLLFLQMNILKSEDTAMYYCARFD
WDKNYWGQGTMVTVSSGGGGSGGGSGGSGGGSGGGGSDIQMTQSPSSLPASLGDRVTINCQASQDISNYLNWYQQKP
GKAPKLLIYYTNKLADGVPSRFSGSGSGRDSSFTISSLESEDIGSYYCQQYYNYPWTFGPGTKLEIKRGGGGSQVQL
KQSGPGLVQPSQSLSITCTVSGFSLTNYGVHWVRQSPGKGLEWLGVIWSGGNTDYNTPFTSRLSINKDNSKSQVFFK
MNSLQSQDTAIYYCARALTYYDYEFAYWGQGTLVTVSAASTKGPSVFPLAPSSKSTSGGTAALGCLVKDYFPEPVTV
SWNSGALTSGVHTFPAVLQSSGLYSLSSVVTVPSSSLGTQTYICNVNHKPSNTKVDKKVEPKSCDKTHTCPPCPAPE
LLGGPSVFLFPPKPKDTLMISRTPEVTCVVVDVSHEDPEVKFNWYVDGVEVHNAKTKPREEQYQSTYRVVSVLTVLH
QDWLNGKEYKCKVSNKALPAPIEKTISKAKGQPREPQVYTLPPSREEMTKNQVSLTCLVKGFYPSDIAVEWESNGQP
ENNYKTTPPVLDSDGSFFLYSKLTVDKSRWQQGNVFSCSVMHEALHNHYTQKSLSLSPGK]*
OPP022: LC C225 3954-1204
Nucleotide Sequence
[spacer (SEQ ID NO: 507)][OPP022 without spacer (SEQ ID NO: 509)]
(SEQ ID NO: 449)
[CAAGGCCAGTCTGGCCAG][TGCATCTCACCTCGTGGTTGTCCGGACGGCCCATACGTCATGTACGGCTCGAGCGG
TGGCAGCGGTGGCTCTGGTGGATCCGGTCTGAGCGGCCGTTCCGATAATCATGGCAGTAGCGGTACCCAGATCTTGC
TGACCCAGAGCCCGGTGATTCTGAGCGTGAGCCCGGGCGAACGTGTGAGCTTTAGCTGCCGCGCGAGCCAGAGCATT
GGCACCAACATTCATTGGTATCAGCAGCGCACCAACGGCAGCCCGCGCCTGCTGATTAAATATGCGAGCGAAAGCAT
TAGCGGCATTCCGAGCCGCTTTAGCGGCAGCGGCAGCGGCACCGATTTTACCCTGAGCATTAACAGCGTGGAAAGCG
AAGATATTGCGGATTATTATTGCCAGCAGAACAACAACTGGCCGACCACCTTTGGCGCGGGCACCAAACTGGAACTG
AAACGTACGGTGGCTGCACCATCTGTCTTCATCTTCCCGCCATCTGATGAGCAGTTGAAATCTGGAACTGCCTCTGT
TGTGTGCCTGCTGAATAACTTCTATCCCAGAGAGGCCAAAGTACAGTGGAAGGTGGATAACGCCCTCCAATCGGGTA
ACTCCCAGGAGAGTGTCACAGAGCAGGACAGCAAGGACAGCACCTACAGCCTCAGCAGCACCCTGACGCTGAGCAAA
GCAGACTACGAGAAACACAAAGTCTACGCCTGCGAAGTCACCCATCAGGGCCTGAGCTCGCCCGTCACAAAGAGCTT
CAACAGGGGAGAGTGTTAG]
Amino Acid Sequence
[spacer (SEQ ID NO: 87)][OPP022 without spacer (SEQ ID NO: 508)]
(SEQ ID NO: 450)
[QGQSGQ][CISPRGCPDGPYVMYGSSGGSGGSGGSGLSGRSDNHGSSGTQILLTQSPVILSVSPGERVSFSCRASQ
SIGTNIHWYQQRTNGSPRLLIKYASESISGIPSRFSGSGSGTDFTLSINSVESEDIADYYCQQNNNWPTTFGAGTKL
ELKRTVAAPSVFIFPPSDEQLKSGTASVVCLLNNFYPREAKVQWKVDNALQSGNSQESVTEQDSKDSTYSLSSTLTL
SKADYEKHKVYACEVTHQGLSSPVTKSFNRGEC]*
CI056: 3954-1204-C225v5N297Q-MC04-2001-mCD3-H-N
pLW120: HC C225v5N297Q-MC04-2001-mCD3-H-N
Nucleotide Sequence
[spacer (SEQ ID NO: 507)][pLW120 without spacer (SEQ ID NO: 537)]
(SEQ ID NO: 499)
[CAAGGCCAGTCTGGCCAA][TCTATGTGCACTGAGCAGCAGTGGATTGTGAATCATTGCATTAGTGGAGGTGGCTC
GAGCGGTGGCAGCGGTGGCTCTGGTGGTATTAGCAGTGGTCTGTTAAGCGGTCGTAGCGATAATCATGGCGGCGGTT
CTGAAGTGCAGCTGGTGGAATCTGGGGGCGGACTGGTGCAGCCTGGCAAGTCTCTGAAGCTGAGCTGCGAGGCCAGC
GGCTTCACCTTTAGCGGCTACGGCATGCACTGGGTGCGCCAGGCACCTGGCAGAGGCCTGGAAAGCGTGGCCTACAT
CACCAGCAGCAGCATCAACATTAAGTACGCCGACGCCGTGAAGGGCCGGTTCACCGTGTCCAGAGACAACGCCAAGA
ACCTGCTGTTCCTGCAGATGAACATCCTGAAGTCCGAGGACACCGCCATGTACTACTGCGCCAGATTCGACTGGGAC
AAGAACTACTGGGGCCAGGGCACAATGGTCACAGTGTCCAGCGGTGGAGGTGGTAGTGGTGGAGGAAGTGGAGGTTC
AGGAGGTGGAAGCGGTGGTGGTGGTAGTGACATCCAGATGACCCAGAGCCCCAGCAGCCTGCCTGCCTCTCTGGGCG
ATAGAGTGACCATCAACTGCCAGGCCAGCCAGGACATCAGCAACTACCTGAACTGGTATCAGCAGAAGCCCGGCAAG
GCCCCCAAGCTGCTGATCTACTACACCAACAAGCTGGCCGACGGTGTGCCCAGCAGATTCAGCGGCAGCGGTAGCGG
CAGAGACAGCAGCTTCACCATCAGCTCCCTGGAATCCGAGGATATCGGCAGCTACTACTGCCAGCAGTACTACAACT
ACCCCTGGACCTTCGGCCCTGGCACCAAGCTGGAAATCAAAAGAGGAGGTGGTGGATCCCAGGTGCAGCTGAAACAG
AGCGGCCCGGGCCTGGTGCAGCCGAGCCAGAGCCTGAGCATTACCTGCACCGTGAGCGGCTTTAGCCTGACCAACTA
TGGCGTGCATTGGGTGCGCCAGAGCCCGGGCAAAGGCCTGGAATGGCTGGGCGTGATTTGGAGCGGCGGCAACACCG
ATTATAACACCCCGTTTACCAGCCGCCTGAGCATTAACAAAGATAACAGCAAAAGCCAGGTGTTTTTTAAAATGAAC
AGCCTGCAAAGCCAGGATACCGCGATTTATTATTGCGCGCGCGCGCTGACCTATTATGATTATGAATTTGCGTATTG
GGGCCAGGGCACCCTGGTGACCGTGAGCGCGGCTAGCACCAAGGGCCCATCGGTCTTCCCCCTGGCACCCTCCTCCA
AGAGCACCTCTGGGGGCACAGCGGCCCTGGGCTGCCTGGTCAAGGACTACTTCCCCGAACCGGTGACGGTGTCGTGG
AACTCAGGCGCCCTGACCAGCGGCGTGCACACCTTCCCGGCTGTCCTACAGTCCTCAGGACTCTACTCCCTCAGCAG
CGTGGTGACCGTGCCCTCCAGCAGCTTGGGCACCCAGACCTACATCTGCAACGTGAATCACAAGCCCAGCAACACCA
AGGTGGACAAGAAAGTTGAGCCCAAATCTTGTGACAAAACTCACACATGCCCACCGTGCCCAGCACCTGAACTCCTG
GGGGGACCGTCAGTCTTCCTCTTCCCCCCAAAACCCAAGGACACCCTCATGATCTCCCGGACCCCTGAGGTCACATG
CGTGGTGGTGGACGTGAGCCACGAAGACCCTGAGGTCAAGTTCAACTGGTACGTGGACGGCGTGGAGGTGCATAATG
CCAAGACAAAGCCGCGGGAGGAGCAGTACCAGAGCACGTACCGTGTGGTCAGCGTCCTCACCGTCCTGCACCAGGAC
TGGCTGAATGGCAAGGAGTACAAGTGCAAGGTCTCCAACAAAGCCCTCCCAGCCCCCATCGAGAAAACCATCTCCAA
AGCCAAAGGGCAGCCCCGAGAACCACAGGTGTACACCCTGCCCCCATCCCGGGAGGAGATGACCAAGAACCAGGTCA
GCCTGACCTGCCTGGTCAAAGGCTTCTATCCCAGCGACATCGCCGTGGAGTGGGAGAGCAATGGGCAGCCGGAGAAC
AACTACAAGACCACGCCTCCCGTGCTGGACTCCGACGGCTCCTTCTTCCTCTACAGCAAGCTCACCGTGGACAAGAG
CAGGTGGCAGCAGGGGAACGTCTTCTCATGCTCCGTGATGCATGAGGCTCTGCACAACCACTACACGCAGAAGAGCC
TCTCCCTGTCTCCGGGTAAATGA
Amino Acid Sequence
[spacer (SEQ ID NO: 87)][pLW120 without spacer (SEQ ID NO: 538)]
(SEQ ID NO: 500)
[QGQSGQ][SMCTEQQWIVNHCISGGGSSGGSGGSGGISSGLLSGRSDNHGGGSEVQLVESGGGLVQPGKSLKLSCE
ASGFTFSGYGMHWVRQAPGRGLESVAYITSSSINIKYADAVKGRFTVSRDNAKNLLFLQMNILKSEDTAMYYCARFD
WDKNYWGQGTMVTVSSGGGGSGGGSGGSGGGSGGGGSDIQMTQSPSSLPASLGDRVTINCQASQDISNYLNWYQQKP
GKAPKLLIYYTNKLADGVPSRFSGSGSGRDSSFTISSLESEDIGSYYCQQYYNYPWTFGPGTKLEIKRGGGGSQVQL
KQSGPGLVQPSQSLSITCTVSGFSLTNYGVHWVRQSPGKGLEWLGVIWSGGNTDYNTPFTSRLSINKDNSKSQVFFK
MNSLQSQDTAIYYCARALTYYDYEFAYWGQGTLVTVSAASTKGPSVFPLAPSSKSTSGGTAALGCLVKDYFPEPVTV
SWNSGALTSGVHTFPAVLQSSGLYSLSSVVTVPSSSLGTQTYICNVNHKPSNTKVDKKVEPKSCDKTHTCPPCPAPE
LLGGPSVFLFPPKPKDTLMISRTPEVTCVVVDVSHEDPEVKFNWYVDGVEVHNAKTKPREEQYQSTYRVVSVLTVLH
QDWLNGKEYKCKVSNKALPAPIEKTISKAKGQPREPQVYTLPPSREEMTKNQVSLTCLVKGFYPSDIAVEWESNGQP
ENNYKTTPPVLDSDGSFFLYSKLTVDKSRWQQGNVFSCSVMHEALHNHYTQKSLSLSPGK]*
OPP022: LC C225 3954-1204
Nucleotide Sequence
[spacer (SEQ ID NO: 507)][OPP022 without spacer (SEQ ID NO: 509)]
(SEQ ID NO: 449)
[CAAGGCCAGTCTGGCCAG][TGCATCTCACCTCGTGGTTGTCCGGACGGCCCATACGTCATGTACGGCTCGAGCGG
TGGCAGCGGTGGCTCTGGTGGATCCGGTCTGAGCGGCCGTTCCGATAATCATGGCAGTAGCGGTACCCAGATCTTGC
TGACCCAGAGCCCGGTGATTCTGAGCGTGAGCCCGGGCGAACGTGTGAGCTTTAGCTGCCGCGCGAGCCAGAGCATT
GGCACCAACATTCATTGGTATCAGCAGCGCACCAACGGCAGCCCGCGCCTGCTGATTAAATATGCGAGCGAAAGCAT
TAGCGGCATTCCGAGCCGCTTTAGCGGCAGCGGCAGCGGCACCGATTTTACCCTGAGCATTAACAGCGTGGAAAGCG
AAGATATTGCGGATTATTATTGCCAGCAGAACAACAACTGGCCGACCACCTTTGGCGCGGGCACCAAACTGGAACTG
AAACGTACGGTGGCTGCACCATCTGTCTTCATCTTCCCGCCATCTGATGAGCAGTTGAAATCTGGAACTGCCTCTGT
TGTGTGCCTGCTGAATAACTTCTATCCCAGAGAGGCCAAAGTACAGTGGAAGGTGGATAACGCCCTCCAATCGGGTA
ACTCCCAGGAGAGTGTCACAGAGCAGGACAGCAAGGACAGCACCTACAGCCTCAGCAGCACCCTGACGCTGAGCAAA
GCAGACTACGAGAAACACAAAGTCTACGCCTGCGAAGTCACCCATCAGGGCCTGAGCTCGCCCGTCACAAAGAGCTT
CAACAGGGGAGAGTGTTAG]
Amino Acid Sequence
[spacer (SEQ ID NO: 87)][OPP022 without spacer (SEQ ID NO: 508)]
(SEQ ID NO: 450)
[QGQSGQ][CISPRGCPDGPYVMYGSSGGSGGSGGSGLSGRSDNHGSSGTQILLTQSPVILSVSPGERVSFSCRASQ
SIGTNIHWYQQRTNGSPRLLIKYASESISGIPSRFSGSGSGTDFTLSINSVESEDIADYYCQQNNNWPTTFGAGTKL
ELKRTVAAPSVFIFPPSDEQLKSGTASVVCLLNNFYPREAKVQWKVDNALQSGNSQESVTEQDSKDSTYSLSSTLTL
SKADYEKHKVYACEVTHQGLSSPVTKSFNRGEC]*
CI049: 3954-1204-C225v5N297Q-MC05-2001-mCD3-H-N
pLW121: HC C225v5N297Q-MC05-2001-mCD3-H-N
Nucleotide Sequence
[spacer (SEQ ID NO: 507)][pLW121 without spacer (SEQ ID NO: 539)]
(SEQ ID NO: 485)
[CAAGGCCAGTCTGGCCAA][ATTCATCCGATGTGCCATCCTGAGGGTGTTTGCGTTGCTCTGGATGGAGGTGGCTC
GAGCGGTGGCAGCGGTGGCTCTGGTGGTATTAGCAGTGGTCTGTTAAGCGGTCGTAGCGATAATCATGGCGGCGGTT
CTGAAGTGCAGCTGGTGGAATCTGGGGGCGGACTGGTGCAGCCTGGCAAGTCTCTGAAGCTGAGCTGCGAGGCCAGC
GGCTTCACCTTTAGCGGCTACGGCATGCACTGGGTGCGCCAGGCACCTGGCAGAGGCCTGGAAAGCGTGGCCTACAT
CACCAGCAGCAGCATCAACATTAAGTACGCCGACGCCGTGAAGGGCCGGTTCACCGTGTCCAGAGACAACGCCAAGA
ACCTGCTGTTCCTGCAGATGAACATCCTGAAGTCCGAGGACACCGCCATGTACTACTGCGCCAGATTCGACTGGGAC
AAGAACTACTGGGGCCAGGGCACAATGGTCACAGTGTCCAGCGGTGGAGGTGGTAGTGGTGGAGGAAGTGGAGGTTC
AGGAGGTGGAAGCGGTGGTGGTGGTAGTGACATCCAGATGACCCAGAGCCCCAGCAGCCTGCCTGCCTCTCTGGGCG
ATAGAGTGACCATCAACTGCCAGGCCAGCCAGGACATCAGCAACTACCTGAACTGGTATCAGCAGAAGCCCGGCAAG
GCCCCCAAGCTGCTGATCTACTACACCAACAAGCTGGCCGACGGTGTGCCCAGCAGATTCAGCGGCAGCGGTAGCGG
CAGAGACAGCAGCTTCACCATCAGCTCCCTGGAATCCGAGGATATCGGCAGCTACTACTGCCAGCAGTACTACAACT
ACCCCTGGACCTTCGGCCCTGGCACCAAGCTGGAAATCAAAAGAGGAGGTGGTGGATCCCAGGTGCAGCTGAAACAG
AGCGGCCCGGGCCTGGTGCAGCCGAGCCAGAGCCTGAGCATTACCTGCACCGTGAGCGGCTTTAGCCTGACCAACTA
TGGCGTGCATTGGGTGCGCCAGAGCCCGGGCAAAGGCCTGGAATGGCTGGGCGTGATTTGGAGCGGCGGCAACACCG
ATTATAACACCCCGTTTACCAGCCGCCTGAGCATTAACAAAGATAACAGCAAAAGCCAGGTGTTTTTTAAAATGAAC
AGCCTGCAAAGCCAGGATACCGCGATTTATTATTGCGCGCGCGCGCTGACCTATTATGATTATGAATTTGCGTATTG
GGGCCAGGGCACCCTGGTGACCGTGAGCGCGGCTAGCACCAAGGGCCCATCGGTCTTCCCCCTGGCACCCTCCTCCA
AGAGCACCTCTGGGGGCACAGCGGCCCTGGGCTGCCTGGTCAAGGACTACTTCCCCGAACCGGTGACGGTGTCGTGG
AACTCAGGCGCCCTGACCAGCGGCGTGCACACCTTCCCGGCTGTCCTACAGTCCTCAGGACTCTACTCCCTCAGCAG
CGTGGTGACCGTGCCCTCCAGCAGCTTGGGCACCCAGACCTACATCTGCAACGTGAATCACAAGCCCAGCAACACCA
AGGTGGACAAGAAAGTTGAGCCCAAATCTTGTGACAAAACTCACACATGCCCACCGTGCCCAGCACCTGAACTCCTG
GGGGGACCGTCAGTCTTCCTCTTCCCCCCAAAACCCAAGGACACCCTCATGATCTCCCGGACCCCTGAGGTCACATG
CGTGGTGGTGGACGTGAGCCACGAAGACCCTGAGGTCAAGTTCAACTGGTACGTGGACGGCGTGGAGGTGCATAATG
CCAAGACAAAGCCGCGGGAGGAGCAGTACCAGAGCACGTACCGTGTGGTCAGCGTCCTCACCGTCCTGCACCAGGAC
TGGCTGAATGGCAAGGAGTACAAGTGCAAGGTCTCCAACAAAGCCCTCCCAGCCCCCATCGAGAAAACCATCTCCAA
AGCCAAAGGGCAGCCCCGAGAACCACAGGTGTACACCCTGCCCCCATCCCGGGAGGAGATGACCAAGAACCAGGTCA
GCCTGACCTGCCTGGTCAAAGGCTTCTATCCCAGCGACATCGCCGTGGAGTGGGAGAGCAATGGGCAGCCGGAGAAC
AACTACAAGACCACGCCTCCCGTGCTGGACTCCGACGGCTCCTTCTTCCTCTACAGCAAGCTCACCGTGGACAAGAG
CAGGTGGCAGCAGGGGAACGTCTTCTCATGCTCCGTGATGCATGAGGCTCTGCACAACCACTACACGCAGAAGAGCC
TCTCCCTGTCTCCGGGTAAATGA]
Amino Acid Sequence
[spacer (SEQ ID NO: 87)][pLW121 without spacer (SEQ ID NO: 540)]
(SEQ ID NO: 486)
[QGQSGQ][IHPMCHPEGVCVALDGGGSSGGSGGSGGISSGLLSGRSDNHGGGSEVQLVESGGGLVQPGKSLKLSCE
ASGFTFSGYGMHWVRQAPGRGLESVAYITSSSINIKYADAVKGRFTVSRDNAKNLLFLQMNILKSEDTAMYYCARFD
WDKNYWGQGTMVTVSSGGGGSGGGSGGSGGGSGGGGSDIQMTQSPSSLPASLGDRVTINCQASQDISNYLNWYQQKP
GKAPKLLIYYTNKLADGVPSRFSGSGSGRDSSFTISSLESEDIGSYYCQQYYNYPWTFGPGTKLEIKRGGGGSQVQL
KQSGPGLVQPSQSLSITCTVSGFSLTNYGVHWVRQSPGKGLEWLGVIWSGGNTDYNTPFTSRLSINKDNSKSQVFFK
MNSLQSQDTAIYYCARALTYYDYEFAYWGQGTLVTVSAASTKGPSVFPLAPSSKSTSGGTAALGCLVKDYFPEPVTV
SWNSGALTSGVHTFPAVLQSSGLYSLSSVVTVPSSSLGTQTYICNVNHKPSNTKVDKKVEPKSCDKTHTCPPCPAPE
LLGGPSVFLFPPKPKDTLMISRTPEVTCVVVDVSHEDPEVKFNWYVDGVEVHNAKTKPREEQYQSTYRVVSVLTVLH
QDWLNGKEYKCKVSNKALPAPIEKTISKAKGQPREPQVYTLPPSREEMTKNQVSLTCLVKGFYPSDIAVEWESNGQP
ENNYKTTPPVLDSDGSFFLYSKLTVDKSRWQQGNVFSCSVMHEALHNHYTQKSLSLSPGK]*
OPP022: LC C225 3954-1204
Nucleotide Sequence
[spacer (SEQ ID NO: 507)][OPP022 without spacer (SEQ ID NO: 509)]
(SEQ ID NO: 449)
[CAAGGCCAGTCTGGCCAG][TGCATCTCACCTCGTGGTTGTCCGGACGGCCCATACGTCATGTACGGCTCGAGCGG
TGGCAGCGGTGGCTCTGGTGGATCCGGTCTGAGCGGCCGTTCCGATAATCATGGCAGTAGCGGTACCCAGATCTTGC
TGACCCAGAGCCCGGTGATTCTGAGCGTGAGCCCGGGCGAACGTGTGAGCTTTAGCTGCCGCGCGAGCCAGAGCATT
GGCACCAACATTCATTGGTATCAGCAGCGCACCAACGGCAGCCCGCGCCTGCTGATTAAATATGCGAGCGAAAGCAT
TAGCGGCATTCCGAGCCGCTTTAGCGGCAGCGGCAGCGGCACCGATTTTACCCTGAGCATTAACAGCGTGGAAAGCG
AAGATATTGCGGATTATTATTGCCAGCAGAACAACAACTGGCCGACCACCTTTGGCGCGGGCACCAAACTGGAACTG
AAACGTACGGTGGCTGCACCATCTGTCTTCATCTTCCCGCCATCTGATGAGCAGTTGAAATCTGGAACTGCCTCTGT
TGTGTGCCTGCTGAATAACTTCTATCCCAGAGAGGCCAAAGTACAGTGGAAGGTGGATAACGCCCTCCAATCGGGTA
ACTCCCAGGAGAGTGTCACAGAGCAGGACAGCAAGGACAGCACCTACAGCCTCAGCAGCACCCTGACGCTGAGCAAA
GCAGACTACGAGAAACACAAAGTCTACGCCTGCGAAGTCACCCATCAGGGCCTGAGCTCGCCCGTCACAAAGAGCTT
CAACAGGGGAGAGTGTTAG]
Amino Acid Sequence
[spacer (SEQ ID NO: 87)][OPP022 without spacer (SEQ ID NO: 508)]
(SEQ ID NO: 450)
[QGQSGQ][CISPRGCPDGPYVMYGSSGGSGGSGGSGLSGRSDNHGSSGTQILLTQSPVILSVSPGERVSFSCRASQ
SIGTNIHWYQQRTNGSPRLLIKYASESISGIPSRFSGSGSGTDFTLSINSVESEDIADYYCQQNNNWPTTFGAGTKL
ELKRTVAAPSVFIFPPSDEQLKSGTASVVCLLNNFYPREAKVQWKVDNALQSGNSQESVTEQDSKDSTYSLSSTLTL
SKADYEKHKVYACEVTHQGLSSPVTKSFNRGEC]*
CI050: 3954-1204-C225v5N297Q-MC06-2001-mCD3-H-N
pLW122: HC C225v5N297Q-MC06-2001-mCD3-H-N
Nucleotide Sequence
[spacer (SEQ ID NO: 507)][pLW122 without spacer (SEQ ID NO: 541)]
(SEQ ID NO: 487)
[CAAGGCCAGTCTGGCCAA][GATTGCTTTGTGCCTGGGTGGTATTTGGCGGGTCCGTGCGCTCAGGGAGGTGGCTC
GAGCGGTGGCAGCGGTGGCTCTGGTGGTATTAGCAGTGGTCTGTTAAGCGGTCGTAGCGATAATCATGGCGGCGGTT
CTGAAGTGCAGCTGGTGGAATCTGGGGGCGGACTGGTGCAGCCTGGCAAGTCTCTGAAGCTGAGCTGCGAGGCCAGC
GGCTTCACCTTTAGCGGCTACGGCATGCACTGGGTGCGCCAGGCACCTGGCAGAGGCCTGGAAAGCGTGGCCTACAT
CACCAGCAGCAGCATCAACATTAAGTACGCCGACGCCGTGAAGGGCCGGTTCACCGTGTCCAGAGACAACGCCAAGA
ACCTGCTGTTCCTGCAGATGAACATCCTGAAGTCCGAGGACACCGCCATGTACTACTGCGCCAGATTCGACTGGGAC
AAGAACTACTGGGGCCAGGGCACAATGGTCACAGTGTCCAGCGGTGGAGGTGGTAGTGGTGGAGGAAGTGGAGGTTC
AGGAGGTGGAAGCGGTGGTGGTGGTAGTGACATCCAGATGACCCAGAGCCCCAGCAGCCTGCCTGCCTCTCTGGGCG
ATAGAGTGACCATCAACTGCCAGGCCAGCCAGGACATCAGCAACTACCTGAACTGGTATCAGCAGAAGCCCGGCAAG
GCCCCCAAGCTGCTGATCTACTACACCAACAAGCTGGCCGACGGTGTGCCCAGCAGATTCAGCGGCAGCGGTAGCGG
CAGAGACAGCAGCTTCACCATCAGCTCCCTGGAATCCGAGGATATCGGCAGCTACTACTGCCAGCAGTACTACAACT
ACCCCTGGACCTTCGGCCCTGGCACCAAGCTGGAAATCAAAAGAGGAGGTGGTGGATCCCAGGTGCAGCTGAAACAG
AGCGGCCCGGGCCTGGTGCAGCCGAGCCAGAGCCTGAGCATTACCTGCACCGTGAGCGGCTTTAGCCTGACCAACTA
TGGCGTGCATTGGGTGCGCCAGAGCCCGGGCAAAGGCCTGGAATGGCTGGGCGTGATTTGGAGCGGCGGCAACACCG
ATTATAACACCCCGTTTACCAGCCGCCTGAGCATTAACAAAGATAACAGCAAAAGCCAGGTGTTTTTTAAAATGAAC
AGCCTGCAAAGCCAGGATACCGCGATTTATTATTGCGCGCGCGCGCTGACCTATTATGATTATGAATTTGCGTATTG
GGGCCAGGGCACCCTGGTGACCGTGAGCGCGGCTAGCACCAAGGGCCCATCGGTCTTCCCCCTGGCACCCTCCTCCA
AGAGCACCTCTGGGGGCACAGCGGCCCTGGGCTGCCTGGTCAAGGACTACTTCCCCGAACCGGTGACGGTGTCGTGG
AACTCAGGCGCCCTGACCAGCGGCGTGCACACCTTCCCGGCTGTCCTACAGTCCTCAGGACTCTACTCCCTCAGCAG
CGTGGTGACCGTGCCCTCCAGCAGCTTGGGCACCCAGACCTACATCTGCAACGTGAATCACAAGCCCAGCAACACCA
AGGTGGACAAGAAAGTTGAGCCCAAATCTTGTGACAAAACTCACACATGCCCACCGTGCCCAGCACCTGAACTCCTG
GGGGGACCGTCAGTCTTCCTCTTCCCCCCAAAACCCAAGGACACCCTCATGATCTCCCGGACCCCTGAGGTCACATG
CGTGGTGGTGGACGTGAGCCACGAAGACCCTGAGGTCAAGTTCAACTGGTACGTGGACGGCGTGGAGGTGCATAATG
CCAAGACAAAGCCGCGGGAGGAGCAGTACCAGAGCACGTACCGTGTGGTCAGCGTCCTCACCGTCCTGCACCAGGAC
TGGCTGAATGGCAAGGAGTACAAGTGCAAGGTCTCCAACAAAGCCCTCCCAGCCCCCATCGAGAAAACCATCTCCAA
AGCCAAAGGGCAGCCCCGAGAACCACAGGTGTACACCCTGCCCCCATCCCGGGAGGAGATGACCAAGAACCAGGTCA
GCCTGACCTGCCTGGTCAAAGGCTTCTATCCCAGCGACATCGCCGTGGAGTGGGAGAGCAATGGGCAGCCGGAGAAC
AACTACAAGACCACGCCTCCCGTGCTGGACTCCGACGGCTCCTTCTTCCTCTACAGCAAGCTCACCGTGGACAAGAG
CAGGTGGCAGCAGGGGAACGTCTTCTCATGCTCCGTGATGCATGAGGCTCTGCACAACCACTACACGCAGAAGAGCC
TCTCCCTGTCTCCGGGTAAATGA]
Amino Acid Sequence
[spacer (SEQ ID NO: 87)][pLW122 without spacer (SEQ ID NO: 542)]
(SEQ ID NO: 488)
[QGQSGQ][DCFVPGWYLAGPCAQGGGSSGGSGGSGGISSGLLSGRSDNHGGGSEVQLVESGGGLVQPGKSLKLSCE
ASGFTFSGYGMHWVRQAPGRGLESVAYITSSSINIKYADAVKGRFTVSRDNAKNLLFLQMNILKSEDTAMYYCARFD
WDKNYWGQGTMVTVSSGGGGSGGGSGGSGGGSGGGGSDIQMTQSPSSLPASLGDRVTINCQASQDISNYLNWYQQKP
GKAPKLLIYYTNKLADGVPSRFSGSGSGRDSSFTISSLESEDIGSYYCQQYYNYPWTFGPGTKLEIKRGGGGSQVQL
KQSGPGLVQPSQSLSITCTVSGFSLTNYGVHWVRQSPGKGLEWLGVIWSGGNTDYNTPFTSRLSINKDNSKSQVFFK
MNSLQSQDTAIYYCARALTYYDYEFAYWGQGTLVTVSAASTKGPSVFPLAPSSKSTSGGTAALGCLVKDYFPEPVTV
SWNSGALTSGVHTFPAVLQSSGLYSLSSVVTVPSSSLGTQTYICNVNHKPSNTKVDKKVEPKSCDKTHTCPPCPAPE
LLGGPSVFLFPPKPKDTLMISRTPEVTCVVVDVSHEDPEVKFNWYVDGVEVHNAKTKPREEQYQSTYRVVSVLTVLH
QDWLNGKEYKCKVSNKALPAPIEKTISKAKGQPREPQVYTLPPSREEMTKNQVSLTCLVKGFYPSDIAVEWESNGQP
ENNYKTTPPVLDSDGSFFLYSKLTVDKSRWQQGNVFSCSVMHEALHNHYTQKSLSLSPGK]*
OPP022: LC C225 3954-1204
Nucleotide Sequence
[spacer (SEQ ID NO: 507)][OPP022 without spacer (SEQ ID NO: 509)]
(SEQ ID NO: 449)
[CAAGGCCAGTCTGGCCAG][TGCATCTCACCTCGTGGTTGTCCGGACGGCCCATACGTCATGTACGGCTCGAGCGG
TGGCAGCGGTGGCTCTGGTGGATCCGGTCTGAGCGGCCGTTCCGATAATCATGGCAGTAGCGGTACCCAGATCTTGC
TGACCCAGAGCCCGGTGATTCTGAGCGTGAGCCCGGGCGAACGTGTGAGCTTTAGCTGCCGCGCGAGCCAGAGCATT
GGCACCAACATTCATTGGTATCAGCAGCGCACCAACGGCAGCCCGCGCCTGCTGATTAAATATGCGAGCGAAAGCAT
TAGCGGCATTCCGAGCCGCTTTAGCGGCAGCGGCAGCGGCACCGATTTTACCCTGAGCATTAACAGCGTGGAAAGCG
AAGATATTGCGGATTATTATTGCCAGCAGAACAACAACTGGCCGACCACCTTTGGCGCGGGCACCAAACTGGAACTG
AAACGTACGGTGGCTGCACCATCTGTCTTCATCTTCCCGCCATCTGATGAGCAGTTGAAATCTGGAACTGCCTCTGT
TGTGTGCCTGCTGAATAACTTCTATCCCAGAGAGGCCAAAGTACAGTGGAAGGTGGATAACGCCCTCCAATCGGGTA
ACTCCCAGGAGAGTGTCACAGAGCAGGACAGCAAGGACAGCACCTACAGCCTCAGCAGCACCCTGACGCTGAGCAAA
GCAGACTACGAGAAACACAAAGTCTACGCCTGCGAAGTCACCCATCAGGGCCTGAGCTCGCCCGTCACAAAGAGCTT
CAACAGGGGAGAGTGTTAG]
Amino Acid Sequence
[spacer (SEQ ID NO: 87)][OPP022 without spacer (SEQ ID NO: 508)]
(SEQ ID NO: 450)
[QGQSGQ][CISPRGCPDGPYVMYGSSGGSGGSGGSGLSGRSDNHGSSGTQILLTQSPVILSVSPGERVSFSCRASQ
SIGTNIHWYQQRTNGSPRLLIKYASESISGIPSRFSGSGSGTDFTLSINSVESEDIADYYCQQNNNWPTTFGAGTKL
ELKRTVAAPSVFIFPPSDEQLKSGTASVVCLLNNFYPREAKVQWKVDNALQSGNSQESVTEQDSKDSTYSLSSTLTL
SKADYEKHKVYACEVTHQGLSSPVTKSFNRGEC]*
CI051: 3954-1204-C225v5N297Q-MC07-2001-mCD3-H-N
pLW123: HC C225v5N297Q-MC07-2001-mCD3-H-N
Nucleotide Sequence
[spacer (SEQ ID NO: 521)][pLW123 without spacer (SEQ ID NO: 543)]
(SEQ ID NO: 489)
[CAAGGCCAGTCTGGCCAAGGT][GTGTGCCATTCTCGGTTGGAGTGGCTTCTGGGTTGCCAAGGAGGAGGTGGCTC
GAGCGGTGGCAGCGGTGGCTCTGGTGGTATTAGCAGTGGTCTGTTAAGCGGTCGTAGCGATAATCATGGCGGCGGTT
CTGAAGTGCAGCTGGTGGAATCTGGGGGCGGACTGGTGCAGCCTGGCAAGTCTCTGAAGCTGAGCTGCGAGGCCAGC
GGCTTCACCTTTAGCGGCTACGGCATGCACTGGGTGCGCCAGGCACCTGGCAGAGGCCTGGAAAGCGTGGCCTACAT
CACCAGCAGCAGCATCAACATTAAGTACGCCGACGCCGTGAAGGGCCGGTTCACCGTGTCCAGAGACAACGCCAAGA
ACCTGCTGTTCCTGCAGATGAACATCCTGAAGTCCGAGGACACCGCCATGTACTACTGCGCCAGATTCGACTGGGAC
AAGAACTACTGGGGCCAGGGCACAATGGTCACAGTGTCCAGCGGTGGAGGTGGTAGTGGTGGAGGAAGTGGAGGTTC
AGGAGGTGGAAGCGGTGGTGGTGGTAGTGACATCCAGATGACCCAGAGCCCCAGCAGCCTGCCTGCCTCTCTGGGCG
ATAGAGTGACCATCAACTGCCAGGCCAGCCAGGACATCAGCAACTACCTGAACTGGTATCAGCAGAAGCCCGGCAAG
GCCCCCAAGCTGCTGATCTACTACACCAACAAGCTGGCCGACGGTGTGCCCAGCAGATTCAGCGGCAGCGGTAGCGG
CAGAGACAGCAGCTTCACCATCAGCTCCCTGGAATCCGAGGATATCGGCAGCTACTACTGCCAGCAGTACTACAACT
ACCCCTGGACCTTCGGCCCTGGCACCAAGCTGGAAATCAAAAGAGGAGGTGGTGGATCCCAGGTGCAGCTGAAACAG
AGCGGCCCGGGCCTGGTGCAGCCGAGCCAGAGCCTGAGCATTACCTGCACCGTGAGCGGCTTTAGCCTGACCAACTA
TGGCGTGCATTGGGTGCGCCAGAGCCCGGGCAAAGGCCTGGAATGGCTGGGCGTGATTTGGAGCGGCGGCAACACCG
ATTATAACACCCCGTTTACCAGCCGCCTGAGCATTAACAAAGATAACAGCAAAAGCCAGGTGTTTTTTAAAATGAAC
AGCCTGCAAAGCCAGGATACCGCGATTTATTATTGCGCGCGCGCGCTGACCTATTATGATTATGAATTTGCGTATTG
GGGCCAGGGCACCCTGGTGACCGTGAGCGCGGCTAGCACCAAGGGCCCATCGGTCTTCCCCCTGGCACCCTCCTCCA
AGAGCACCTCTGGGGGCACAGCGGCCCTGGGCTGCCTGGTCAAGGACTACTTCCCCGAACCGGTGACGGTGTCGTGG
AACTCAGGCGCCCTGACCAGCGGCGTGCACACCTTCCCGGCTGTCCTACAGTCCTCAGGACTCTACTCCCTCAGCAG
CGTGGTGACCGTGCCCTCCAGCAGCTTGGGCACCCAGACCTACATCTGCAACGTGAATCACAAGCCCAGCAACACCA
AGGTGGACAAGAAAGTTGAGCCCAAATCTTGTGACAAAACTCACACATGCCCACCGTGCCCAGCACCTGAACTCCTG
GGGGGACCGTCAGTCTTCCTCTTCCCCCCAAAACCCAAGGACACCCTCATGATCTCCCGGACCCCTGAGGTCACATG
CGTGGTGGTGGACGTGAGCCACGAAGACCCTGAGGTCAAGTTCAACTGGTACGTGGACGGCGTGGAGGTGCATAATG
CCAAGACAAAGCCGCGGGAGGAGCAGTACCAGAGCACGTACCGTGTGGTCAGCGTCCTCACCGTCCTGCACCAGGAC
TGGCTGAATGGCAAGGAGTACAAGTGCAAGGTCTCCAACAAAGCCCTCCCAGCCCCCATCGAGAAAACCATCTCCAA
AGCCAAAGGGCAGCCCCGAGAACCACAGGTGTACACCCTGCCCCCATCCCGGGAGGAGATGACCAAGAACCAGGTCA
GCCTGACCTGCCTGGTCAAAGGCTTCTATCCCAGCGACATCGCCGTGGAGTGGGAGAGCAATGGGCAGCCGGAGAAC
AACTACAAGACCACGCCTCCCGTGCTGGACTCCGACGGCTCCTTCTTCCTCTACAGCAAGCTCACCGTGGACAAGAG
CAGGTGGCAGCAGGGGAACGTCTTCTCATGCTCCGTGATGCATGAGGCTCTGCACAACCACTACACGCAGAAGAGCC
TCTCCCTGTCTCCGGGTAAATGA]
Amino Acid Sequence
[spacer (SEQ ID NO: 407)][pLW123 without spacer (SEQ ID NO: 544)]
(SEQ ID NO: 490)
[QGQSGQG][VCHSRLEWLLGCQGGGGSSGGSGGSGGISSGLLSGRSDNHGGGSEVQLVESGGGLVQPGKSLKLSCE
ASGFTFSGYGMHWVRQAPGRGLESVAYITSSSINIKYADAVKGRFTVSRDNAKNLLFLQMNILKSEDTAMYYCARFD
WDKNYWGQGTMVTVSSGGGGSGGGSGGSGGGSGGGGSDIQMTQSPSSLPASLGDRVTINCQASQDISNYLNWYQQKP
GKAPKLLIYYTNKLADGVPSRFSGSGSGRDSSFTISSLESEDIGSYYCQQYYNYPWTFGPGTKLEIKRGGGGSQVQL
KQSGPGLVQPSQSLSITCTVSGFSLTNYGVHWVRQSPGKGLEWLGVIWSGGNTDYNTPFTSRLSINKDNSKSQVFFK
MNSLQSQDTAIYYCARALTYYDYEFAYWGQGTLVTVSAASTKGPSVFPLAPSSKSTSGGTAALGCLVKDYFPEPVTV
SWNSGALTSGVHTFPAVLQSSGLYSLSSVVTVPSSSLGTQTYICNVNHKPSNTKVDKKVEPKSCDKTHTCPPCPAPE
LLGGPSVFLFPPKPKDTLMISRTPEVTCVVVDVSHEDPEVKFNWYVDGVEVHNAKTKPREEQYQSTYRVVSVLTVLH
QDWLNGKEYKCKVSNKALPAPIEKTISKAKGQPREPQVYTLPPSREEMTKNQVSLTCLVKGFYPSDIAVEWESNGQP
ENNYKTTPPVLDSDGSFFLYSKLTVDKSRWQQGNVFSCSVMHEALHNHYTQKSLSLSPGK]*
OPP022: LC C225 3954-1204
Nucleotide Sequence
[spacer (SEQ ID NO: 507)][OPP022 without spacer (SEQ ID NO: 509)]
(SEQ ID NO: 449)
[CAAGGCCAGTCTGGCCAG][TGCATCTCACCTCGTGGTTGTCCGGACGGCCCATACGTCATGTACGGCTCGAGCGG
TGGCAGCGGTGGCTCTGGTGGATCCGGTCTGAGCGGCCGTTCCGATAATCATGGCAGTAGCGGTACCCAGATCTTGC
TGACCCAGAGCCCGGTGATTCTGAGCGTGAGCCCGGGCGAACGTGTGAGCTTTAGCTGCCGCGCGAGCCAGAGCATT
GGCACCAACATTCATTGGTATCAGCAGCGCACCAACGGCAGCCCGCGCCTGCTGATTAAATATGCGAGCGAAAGCAT
TAGCGGCATTCCGAGCCGCTTTAGCGGCAGCGGCAGCGGCACCGATTTTACCCTGAGCATTAACAGCGTGGAAAGCG
AAGATATTGCGGATTATTATTGCCAGCAGAACAACAACTGGCCGACCACCTTTGGCGCGGGCACCAAACTGGAACTG
AAACGTACGGTGGCTGCACCATCTGTCTTCATCTTCCCGCCATCTGATGAGCAGTTGAAATCTGGAACTGCCTCTGT
TGTGTGCCTGCTGAATAACTTCTATCCCAGAGAGGCCAAAGTACAGTGGAAGGTGGATAACGCCCTCCAATCGGGTA
ACTCCCAGGAGAGTGTCACAGAGCAGGACAGCAAGGACAGCACCTACAGCCTCAGCAGCACCCTGACGCTGAGCAAA
GCAGACTACGAGAAACACAAAGTCTACGCCTGCGAAGTCACCCATCAGGGCCTGAGCTCGCCCGTCACAAAGAGCTT
CAACAGGGGAGAGTGTTAG]
Amino Acid Sequence
[spacer (SEQ ID NO: 87)][OPP022 without spacer (SEQ ID NO: 508)]
(SEQ ID NO: 450)
[QGQSGQ][CISPRGCPDGPYVMYGSSGGSGGSGGSGLSGRSDNHGSSGTQILLTQSPVILSVSPGERVSFSCRASQ
SIGTNIHWYQQRTNGSPRLLIKYASESISGIPSRFSGSGSGTDFTLSINSVESEDIADYYCQQNNNWPTTFGAGTKL
ELKRTVAAPSVFIFPPSDEQLKSGTASVVCLLNNFYPREAKVQWKVDNALQSGNSQESVTEQDSKDSTYSLSSTLTL
SKADYEKHKVYACEVTHQGLSSPVTKSFNRGEC]*
CI057: 3954-1204-C225v5N297Q-MC08-2001-mCD3-H-N
pLW124: HC C225v5N297Q-MC08-2001-mCD3-H-N
Nucleotide Sequence
[spacer (SEQ ID NO: 507)][pLW124 without spacer (SEQ ID NO: 545)]
(SEQ ID NO: 501)
[CAAGGCCAGTCTGGCCAA][GTGGGTGAGTGCGTTCCGGGTCCGCATGGGTGCTGGATGGCTTATGGAGGTGGCTC
GAGCGGTGGCAGCGGTGGCTCTGGTGGTATTAGCAGTGGTCTGTTAAGCGGTCGTAGCGATAATCATGGCGGCGGTT
CTGAAGTGCAGCTGGTGGAATCTGGGGGCGGACTGGTGCAGCCTGGCAAGTCTCTGAAGCTGAGCTGCGAGGCCAGC
GGCTTCACCTTTAGCGGCTACGGCATGCACTGGGTGCGCCAGGCACCTGGCAGAGGCCTGGAAAGCGTGGCCTACAT
CACCAGCAGCAGCATCAACATTAAGTACGCCGACGCCGTGAAGGGCCGGTTCACCGTGTCCAGAGACAACGCCAAGA
ACCTGCTGTTCCTGCAGATGAACATCCTGAAGTCCGAGGACACCGCCATGTACTACTGCGCCAGATTCGACTGGGAC
AAGAACTACTGGGGCCAGGGCACAATGGTCACAGTGTCCAGCGGTGGAGGTGGTAGTGGTGGAGGAAGTGGAGGTTC
AGGAGGTGGAAGCGGTGGTGGTGGTAGTGACATCCAGATGACCCAGAGCCCCAGCAGCCTGCCTGCCTCTCTGGGCG
ATAGAGTGACCATCAACTGCCAGGCCAGCCAGGACATCAGCAACTACCTGAACTGGTATCAGCAGAAGCCCGGCAAG
GCCCCCAAGCTGCTGATCTACTACACCAACAAGCTGGCCGACGGTGTGCCCAGCAGATTCAGCGGCAGCGGTAGCGG
CAGAGACAGCAGCTTCACCATCAGCTCCCTGGAATCCGAGGATATCGGCAGCTACTACTGCCAGCAGTACTACAACT
ACCCCTGGACCTTCGGCCCTGGCACCAAGCTGGAAATCAAAAGAGGAGGTGGTGGATCCCAGGTGCAGCTGAAACAG
AGCGGCCCGGGCCTGGTGCAGCCGAGCCAGAGCCTGAGCATTACCTGCACCGTGAGCGGCTTTAGCCTGACCAACTA
TGGCGTGCATTGGGTGCGCCAGAGCCCGGGCAAAGGCCTGGAATGGCTGGGCGTGATTTGGAGCGGCGGCAACACCG
ATTATAACACCCCGTTTACCAGCCGCCTGAGCATTAACAAAGATAACAGCAAAAGCCAGGTGTTTTTTAAAATGAAC
AGCCTGCAAAGCCAGGATACCGCGATTTATTATTGCGCGCGCGCGCTGACCTATTATGATTATGAATTTGCGTATTG
GGGCCAGGGCACCCTGGTGACCGTGAGCGCGGCTAGCACCAAGGGCCCATCGGTCTTCCCCCTGGCACCCTCCTCCA
AGAGCACCTCTGGGGGCACAGCGGCCCTGGGCTGCCTGGTCAAGGACTACTTCCCCGAACCGGTGACGGTGTCGTGG
AACTCAGGCGCCCTGACCAGCGGCGTGCACACCTTCCCGGCTGTCCTACAGTCCTCAGGACTCTACTCCCTCAGCAG
CGTGGTGACCGTGCCCTCCAGCAGCTTGGGCACCCAGACCTACATCTGCAACGTGAATCACAAGCCCAGCAACACCA
AGGTGGACAAGAAAGTTGAGCCCAAATCTTGTGACAAAACTCACACATGCCCACCGTGCCCAGCACCTGAACTCCTG
GGGGGACCGTCAGTCTTCCTCTTCCCCCCAAAACCCAAGGACACCCTCATGATCTCCCGGACCCCTGAGGTCACATG
CGTGGTGGTGGACGTGAGCCACGAAGACCCTGAGGTCAAGTTCAACTGGTACGTGGACGGCGTGGAGGTGCATAATG
CCAAGACAAAGCCGCGGGAGGAGCAGTACCAGAGCACGTACCGTGTGGTCAGCGTCCTCACCGTCCTGCACCAGGAC
TGGCTGAATGGCAAGGAGTACAAGTGCAAGGTCTCCAACAAAGCCCTCCCAGCCCCCATCGAGAAAACCATCTCCAA
AGCCAAAGGGCAGCCCCGAGAACCACAGGTGTACACCCTGCCCCCATCCCGGGAGGAGATGACCAAGAACCAGGTCA
GCCTGACCTGCCTGGTCAAAGGCTTCTATCCCAGCGACATCGCCGTGGAGTGGGAGAGCAATGGGCAGCCGGAGAAC
AACTACAAGACCACGCCTCCCGTGCTGGACTCCGACGGCTCCTTCTTCCTCTACAGCAAGCTCACCGTGGACAAGAG
CAGGTGGCAGCAGGGGAACGTCTTCTCATGCTCCGTGATGCATGAGGCTCTGCACAACCACTACACGCAGAAGAGCC
TCTCCCTGTCTCCGGGTAAATGA]
Amino Acid Sequence
[spacer (SEQ ID NO: 87)][pLW124 without spacer (SEQ ID NO: 546)]
(SEQ ID NO: 502)
[QGQSGQ][VGECVPGPHGCWMAYGGGSSGGSGGSGGISSGLLSGRSDNHGGGSEVQLVESGGGLVQPGKSLKLSCE
ASGFTFSGYGMHWVRQAPGRGLESVAYITSSSINIKYADAVKGRFTVSRDNAKNLLFLQMNILKSEDTAMYYCARFD
WDKNYWGQGTMVTVSSGGGGSGGGSGGSGGGSGGGGSDIQMTQSPSSLPASLGDRVTINCQASQDISNYLNWYQQKP
GKAPKLLIYYTNKLADGVPSRFSGSGSGRDSSFTISSLESEDIGSYYCQQYYNYPWTFGPGTKLEIKRGGGGSQVQL
KQSGPGLVQPSQSLSITCTVSGFSLTNYGVHWVRQSPGKGLEWLGVIWSGGNTDYNTPFTSRLSINKDNSKSQVFFK
MNSLQSQDTAIYYCARALTYYDYEFAYWGQGTLVTVSAASTKGPSVFPLAPSSKSTSGGTAALGCLVKDYFPEPVTV
SWNSGALTSGVHTFPAVLQSSGLYSLSSVVTVPSSSLGTQTYICNVNHKPSNTKVDKKVEPKSCDKTHTCPPCPAPE
LLGGPSVFLFPPKPKDTLMISRTPEVTCVVVDVSHEDPEVKFNWYVDGVEVHNAKTKPREEQYQSTYRVVSVLTVLH
QDWLNGKEYKCKVSNKALPAPIEKTISKAKGQPREPQVYTLPPSREEMTKNQVSLTCLVKGFYPSDIAVEWESNGQP
ENNYKTTPPVLDSDGSFFLYSKLTVDKSRWQQGNVFSCSVMHEALHNHYTQKSLSLSPGK]*
OPP022: LC C225 3954-1204
Nucleotide Sequence
[spacer (SEQ ID NO: 507)][OPP022 without spacer (SEQ ID NO: 509)]
(SEQ ID NO: 449)
[CAAGGCCAGTCTGGCCAG][TGCATCTCACCTCGTGGTTGTCCGGACGGCCCATACGTCATGTACGGCTCGAGCGG
TGGCAGCGGTGGCTCTGGTGGATCCGGTCTGAGCGGCCGTTCCGATAATCATGGCAGTAGCGGTACCCAGATCTTGC
TGACCCAGAGCCCGGTGATTCTGAGCGTGAGCCCGGGCGAACGTGTGAGCTTTAGCTGCCGCGCGAGCCAGAGCATT
GGCACCAACATTCATTGGTATCAGCAGCGCACCAACGGCAGCCCGCGCCTGCTGATTAAATATGCGAGCGAAAGCAT
TAGCGGCATTCCGAGCCGCTTTAGCGGCAGCGGCAGCGGCACCGATTTTACCCTGAGCATTAACAGCGTGGAAAGCG
AAGATATTGCGGATTATTATTGCCAGCAGAACAACAACTGGCCGACCACCTTTGGCGCGGGCACCAAACTGGAACTG
AAACGTACGGTGGCTGCACCATCTGTCTTCATCTTCCCGCCATCTGATGAGCAGTTGAAATCTGGAACTGCCTCTGT
TGTGTGCCTGCTGAATAACTTCTATCCCAGAGAGGCCAAAGTACAGTGGAAGGTGGATAACGCCCTCCAATCGGGTA
ACTCCCAGGAGAGTGTCACAGAGCAGGACAGCAAGGACAGCACCTACAGCCTCAGCAGCACCCTGACGCTGAGCAAA
GCAGACTACGAGAAACACAAAGTCTACGCCTGCGAAGTCACCCATCAGGGCCTGAGCTCGCCCGTCACAAAGAGCTT
CAACAGGGGAGAGTGTTAG]
Amino Acid Sequence
[spacer (SEQ ID NO: 87)][OPP022 without spacer (SEQ ID NO: 508)]
(SEQ ID NO: 450)
[QGQSGQ][CISPRGCPDGPYVMYGSSGGSGGSGGSGLSGRSDNHGSSGTQILLTQSPVILSVSPGERVSFSCRASQ
SIGTNIHWYQQRTNGSPRLLIKYASESISGIPSRFSGSGSGTDFTLSINSVESEDIADYYCQQNNNWPTTFGAGTKL
ELKRTVAAPSVFIFPPSDEQLKSGTASVVCLLNNFYPREAKVQWKVDNALQSGNSQESVTEQDSKDSTYSLSSTLTL
SKADYEKHKVYACEVTHQGLSSPVTKSFNRGEC]*
CI058: 3954-1204-C225v5N297Q-MC09-2001-mCD3-H-N
pLW125: HC C225v5N297Q-MC09-2001-mCD3-H-N
Nucleotide Sequence
[spacer (SEQ ID NO: 507)][pLW125 without spacer (SEQ ID NO: 475)]
(SEQ ID NO: 503)
[CAAGGCCAGTCTGGCCAA][TGGACGTGCGGAGGTATGGTGTATCTTGCGGGATTCTGCATGGCGGGAGGTGGCTC
GAGCGGTGGCAGCGGTGGCTCTGGTGGTATTAGCAGTGGTCTGTTAAGCGGTCGTAGCGATAATCATGGCGGCGGTT
CTGAAGTGCAGCTGGTGGAATCTGGGGGCGGACTGGTGCAGCCTGGCAAGTCTCTGAAGCTGAGCTGCGAGGCCAGC
GGCTTCACCTTTAGCGGCTACGGCATGCACTGGGTGCGCCAGGCACCTGGCAGAGGCCTGGAAAGCGTGGCCTACAT
CACCAGCAGCAGCATCAACATTAAGTACGCCGACGCCGTGAAGGGCCGGTTCACCGTGTCCAGAGACAACGCCAAGA
ACCTGCTGTTCCTGCAGATGAACATCCTGAAGTCCGAGGACACCGCCATGTACTACTGCGCCAGATTCGACTGGGAC
AAGAACTACTGGGGCCAGGGCACAATGGTCACAGTGTCCAGCGGTGGAGGTGGTAGTGGTGGAGGAAGTGGAGGTTC
AGGAGGTGGAAGCGGTGGTGGTGGTAGTGACATCCAGATGACCCAGAGCCCCAGCAGCCTGCCTGCCTCTCTGGGCG
ATAGAGTGACCATCAACTGCCAGGCCAGCCAGGACATCAGCAACTACCTGAACTGGTATCAGCAGAAGCCCGGCAAG
GCCCCCAAGCTGCTGATCTACTACACCAACAAGCTGGCCGACGGTGTGCCCAGCAGATTCAGCGGCAGCGGTAGCGG
CAGAGACAGCAGCTTCACCATCAGCTCCCTGGAATCCGAGGATATCGGCAGCTACTACTGCCAGCAGTACTACAACT
ACCCCTGGACCTTCGGCCCTGGCACCAAGCTGGAAATCAAAAGAGGAGGTGGTGGATCCCAGGTGCAGCTGAAACAG
AGCGGCCCGGGCCTGGTGCAGCCGAGCCAGAGCCTGAGCATTACCTGCACCGTGAGCGGCTTTAGCCTGACCAACTA
TGGCGTGCATTGGGTGCGCCAGAGCCCGGGCAAAGGCCTGGAATGGCTGGGCGTGATTTGGAGCGGCGGCAACACCG
ATTATAACACCCCGTTTACCAGCCGCCTGAGCATTAACAAAGATAACAGCAAAAGCCAGGTGTTTTTTAAAATGAAC
AGCCTGCAAAGCCAGGATACCGCGATTTATTATTGCGCGCGCGCGCTGACCTATTATGATTATGAATTTGCGTATTG
GGGCCAGGGCACCCTGGTGACCGTGAGCGCGGCTAGCACCAAGGGCCCATCGGTCTTCCCCCTGGCACCCTCCTCCA
AGAGCACCTCTGGGGGCACAGCGGCCCTGGGCTGCCTGGTCAAGGACTACTTCCCCGAACCGGTGACGGTGTCGTGG
AACTCAGGCGCCCTGACCAGCGGCGTGCACACCTTCCCGGCTGTCCTACAGTCCTCAGGACTCTACTCCCTCAGCAG
CGTGGTGACCGTGCCCTCCAGCAGCTTGGGCACCCAGACCTACATCTGCAACGTGAATCACAAGCCCAGCAACACCA
AGGTGGACAAGAAAGTTGAGCCCAAATCTTGTGACAAAACTCACACATGCCCACCGTGCCCAGCACCTGAACTCCTG
GGGGGACCGTCAGTCTTCCTCTTCCCCCCAAAACCCAAGGACACCCTCATGATCTCCCGGACCCCTGAGGTCACATG
CGTGGTGGTGGACGTGAGCCACGAAGACCCTGAGGTCAAGTTCAACTGGTACGTGGACGGCGTGGAGGTGCATAATG
CCAAGACAAAGCCGCGGGAGGAGCAGTACCAGAGCACGTACCGTGTGGTCAGCGTCCTCACCGTCCTGCACCAGGAC
TGGCTGAATGGCAAGGAGTACAAGTGCAAGGTCTCCAACAAAGCCCTCCCAGCCCCCATCGAGAAAACCATCTCCAA
AGCCAAAGGGCAGCCCCGAGAACCACAGGTGTACACCCTGCCCCCATCCCGGGAGGAGATGACCAAGAACCAGGTCA
GCCTGACCTGCCTGGTCAAAGGCTTCTATCCCAGCGACATCGCCGTGGAGTGGGAGAGCAATGGGCAGCCGGAGAAC
AACTACAAGACCACGCCTCCCGTGCTGGACTCCGACGGCTCCTTCTTCCTCTACAGCAAGCTCACCGTGGACAAGAG
CAGGTGGCAGCAGGGGAACGTCTTCTCATGCTCCGTGATGCATGAGGCTCTGCACAACCACTACACGCAGAAGAGCC
TCTCCCTGTCTCCGGGTAAATGA]
Amino Acid Sequence
[spacer (SEQ ID NO: 87)][pLW087 without spacer (SEQ ID NO: 476)]
(SEQ ID NO: 504)
[QGQSGQ][WTCGGMVYLAGFCMAGGGSSGGSGGSGGISSGLLSGRSDNHGGGSEVQLVESGGGLVQPGKSLKLSCE
ASGFTFSGYGMHWVRQAPGRGLESVAYITSSSINIKYADAVKGRFTVSRDNAKNLLFLQMNILKSEDTAMYYCARFD
WDKNYWGQGTMVTVSSGGGGSGGGSGGSGGGSGGGGSDIQMTQSPSSLPASLGDRVTINCQASQDISNYLNWYQQKP
GKAPKLLIYYTNKLADGVPSRFSGSGSGRDSSFTISSLESEDIGSYYCQQYYNYPWTFGPGTKLEIKRGGGGSQVQL
KQSGPGLVQPSQSLSITCTVSGFSLTNYGVHWVRQSPGKGLEWLGVIWSGGNTDYNTPFTSRLSINKDNSKSQVFFK
MNSLQSQDTAIYYCARALTYYDYEFAYWGQGTLVTVSAASTKGPSVFPLAPSSKSTSGGTAALGCLVKDYFPEPVTV
SWNSGALTSGVHTFPAVLQSSGLYSLSSVVTVPSSSLGTQTYICNVNHKPSNTKVDKKVEPKSCDKTHTCPPCPAPE
LLGGPSVFLFPPKPKDTLMISRTPEVTCVVVDVSHEDPEVKFNWYVDGVEVHNAKTKPREEQYQSTYRVVSVLTVLH
QDWLNGKEYKCKVSNKALPAPIEKTISKAKGQPREPQVYTLPPSREEMTKNQVSLTCLVKGFYPSDIAVEWESNGQP
ENNYKTTPPVLDSDGSFFLYSKLTVDKSRWQQGNVFSCSVMHEALHNHYTQKSLSLSPGK]*
OPP022: LC C225 3954-1204
Nucleotide Sequence
[spacer (SEQ ID NO: 507)][OPP022 without spacer (SEQ ID NO: 509)]
(SEQ ID NO: 449)
[CAAGGCCAGTCTGGCCAG][TGCATCTCACCTCGTGGTTGTCCGGACGGCCCATACGTCATGTACGGCTCGAGCGG
TGGCAGCGGTGGCTCTGGTGGATCCGGTCTGAGCGGCCGTTCCGATAATCATGGCAGTAGCGGTACCCAGATCTTGC
TGACCCAGAGCCCGGTGATTCTGAGCGTGAGCCCGGGCGAACGTGTGAGCTTTAGCTGCCGCGCGAGCCAGAGCATT
GGCACCAACATTCATTGGTATCAGCAGCGCACCAACGGCAGCCCGCGCCTGCTGATTAAATATGCGAGCGAAAGCAT
TAGCGGCATTCCGAGCCGCTTTAGCGGCAGCGGCAGCGGCACCGATTTTACCCTGAGCATTAACAGCGTGGAAAGCG
AAGATATTGCGGATTATTATTGCCAGCAGAACAACAACTGGCCGACCACCTTTGGCGCGGGCACCAAACTGGAACTG
AAACGTACGGTGGCTGCACCATCTGTCTTCATCTTCCCGCCATCTGATGAGCAGTTGAAATCTGGAACTGCCTCTGT
TGTGTGCCTGCTGAATAACTTCTATCCCAGAGAGGCCAAAGTACAGTGGAAGGTGGATAACGCCCTCCAATCGGGTA
ACTCCCAGGAGAGTGTCACAGAGCAGGACAGCAAGGACAGCACCTACAGCCTCAGCAGCACCCTGACGCTGAGCAAA
GCAGACTACGAGAAACACAAAGTCTACGCCTGCGAAGTCACCCATCAGGGCCTGAGCTCGCCCGTCACAAAGAGCTT
CAACAGGGGAGAGTGTTAG]
Amino Acid Sequence
[spacer (SEQ ID NO: 87)][OPP022 without spacer (SEQ ID NO: 508)]
(SEQ ID NO: 450)
[QGQSGQ][CISPRGCPDGPYVMYGSSGGSGGSGGSGLSGRSDNHGSSGTQILLTQSPVILSVSPGERVSFSCRASQ
SIGTNIHWYQQRTNGSPRLLIKYASESISGIPSRFSGSGSGTDFTLSINSVESEDIADYYCQQNNNWPTTFGAGTKL
ELKRTVAAPSVFIFPPSDEQLKSGTASVVCLLNNFYPREAKVQWKVDNALQSGNSQESVTEQDSKDSTYSLSSTLTL
SKADYEKHKVYACEVTHQGLSSPVTKSFNRGEC]*
CI059: BiTE420
BiTE420
Nucleotide Sequence
(SEQ ID NO: 505)
GACATCTTGCTGACTCAGTCTCCAGTCATCCTGTCTGTGAGTCCAGGAGAAAGAGTCAGTTTCTCCTGCAGGGCCAG
TCAGAGCATTGGCACAAACATACACTGGTATCAGCAAAGAACAAATGGTTCTCCAAGGCTTCTCATAAAGTATGCTT
CTGAGTCTATCTCTGGGATCCCTTCCAGGTTTAGTGGCAGTGGATCAGGGACAGATTTTACTCTTAGCATCAACAGT
GTGGAGTCTGAAGATATTGCAGATTATTACTGTCAACAAAATAATAACTGGCCAACCACATTTGGTGCAGGAACAAA
GCTGGAACTGAAAGGTGGTGGTGGTTCTGGCGGCGGCGGCTCCGGTGGTGGTGGTTCTCAGGTGCAGCTGAAGCAGT
CAGGACCTGGCCTAGTGCAGCCCTCACAGAGCCTGTCCATCACCTGCACAGTCTCTGGTTTCTCATTAACTAACTAT
GGAGTACACTGGGTTCGCCAGTCTCCAGGAAAGGGTCTGGAGTGGCTGGGAGTGATATGGAGTGGTGGAAACACAGA
CTATAATACACCTTTCACATCCAGACTGAGCATCAACAAGGACAATTCCAAGAGCCAAGTTTTCTTTAAAATGAACA
GTCTGCAATCTAATGACACAGCCATATATTACTGTGCCAGAGCCCTGACCTATTATGACTACGAGTTCGCCTATTGG
GGTCAGGGAACCCTGGTTACCGTGTCTTCCGGAGGTGGTGGATCCGAGGTGCAGCTGGTCGAGTCTGGAGGAGGATT
GGTGCAGCCTGGAGGGTCATTGAAACTCTCATGTGCAGCCTCTGGATTCACCTTCAATAAGTACGCCATGAACTGGG
TCCGCCAGGCTCCAGGAAAGGGTTTGGAATGGGTTGCTCGCATAAGAAGTAAATATAATAATTATGCAACATATTAT
GCCGATTCAGTGAAAGACAGGTTCACCATCTCCAGAGATGATTCAAAAAACACTGCCTATCTACAAATGAACAACTT
GAAAACTGAGGACACTGCCGTGTACTACTGTGTGAGACATGGGAACTTCGGTAATAGCTACATATCCTACTGGGCTT
ACTGGGGCCAAGGGACTCTGGTCACCGTCTCCTCAGGTGGTGGTGGTTCTGGCGGCGGCGGCTCCGGTGGTGGTGGT
TCTCAGACTGTTGTGACTCAGGAACCTTCACTCACCGTATCACCTGGTGGAACAGTCACACTCACTTGTGGCTCCTC
GACTGGGGCTGTTACATCTGGCTACTACCCAAACTGGGTCCAACAAAAACCAGGTCAGGCACCCCGTGGTCTAATAG
GTGGGACTAAGTTCCTCGCCCCCGGTACTCCTGCCAGATTCTCAGGCTCCCTGCTTGGAGGCAAGGCTGCCCTCACC
CTCTCAGGGGTACAGCCAGAGGATGAGGCAGAATATTACTGTGCTCTATGGTACAGCAACCGCTGGGTGTTCGGTGG
AGGAACCAAACTGACTGTCCTACACCATCACCACCATCATCACCACTAG
Amino Acid Sequence
(SEQ ID NO: 506)
DILLTQSPVILSVSPGERVSFSCRASQSIGTNIHWYQQRTNGSPRLLIKYASESISGIPSRFSGSGSGTDFTLSINS
VESEDIADYYCQQNNNWPTTFGAGTKLELKGGGGSGGGGSGGGGSQVQLKQSGPGLVQPSQSLSITCTVSGFSLTNY
GVHWVRQSPGKGLEWLGVIWSGGNTDYNTPFTSRLSINKDNSKSQVFFKMNSLQSNDTAIYYCARALTYYDYEFAYW
GQGTLVTVSSGGGGSEVQLVESGGGLVQPGGSLKLSCAASGFTFNKYAMNWVRQAPGKGLEWVARIRSKYNNYATYY
ADSVKDRFTISRDDSKNTAYLQMNNLKTEDTAVYYCVRHGNFGNSYISYWAYWGQGTLVTVSSGGGGSGGGGSGGGG
SQTVVTQEPSLTVSPGGTVTLTCGSSTGAVTSGYYPNWVQQKPGQAPRGLIGGTKFLAPGTPARFSGSLLGGKAALT
LSGVQPEDEAEYYCALWYSNRWVFGGGTKLTVL*

### Example 5

### SP34 scFv-Fc Binding to CD3ε Positive Jurkat Cells

[0608] To determine if the SP34 scFv Fc fusions could bind to CD3ε positive Jurkat T cells, a flow cytometry-based binding assay was performed. Jurkat T cells (Clone E6-1, ATCC, TIB-152) were cultured in RPMI-1640+glutamax (Life Technologies, Catalog 72400-120), 10% Heat Inactivated-Fetal Bovine Serum (HI-FBS, Life Technologies, Catalog 10438-026), 100 U/ml penicillin, and 100 μg/ml streptomycin (Life Technologies, Catalog 15140-122) according to ATCC guidelines. Cells were harvested by centrifugation (200×g, 4° C., 5 min) and re-suspended in PBS supplemented with 2% HI-FBS (FACS Buffer). About 250,000 Jurkats per well were transferred to a 96-well U-bottom plate, harvested, and re-suspended in 50 μL of primary antibody. The starting concentration of antibody was 200 nM followed by 5-fold serial dilutions for a total of 8 concentrations. The following antibodies were tested: SP34 LvHv scFv Fc, SP34 HvLv scFv Fc, and SP34-2.

[0609] Cells were incubated at 4° C. with shaking for about 2 hours, harvested, and washed with 3×200 μL of FACS Buffer. Jurkats treated with the SP34 scFv-Fc fusions were resuspended in 50 μl Alexa Fluor 488 conjugated anti-Human IgG Fc (1:100 dilution, Jackson ImmunoResearch, Product 109-546-098). Cells treated with SP34-2 and mouse isotype were resuspended in 50 μl Alexa Fluor 647 conjugated Anti-mouse IgG (1:100 dilution, Jackson ImmunoResearch, Product 715-605-150). Jurkats were incubated at 4° C. with shaking for about 30 min, harvested, washed with 3×200 μL of FACS Buffer, and resuspended in a final volume of 120 μL of FACS Buffer. Samples were analyzed on a BD Accuri C6 (BD Biosciences) and the median fluorescence intensity (MFI) of viable cells was calculated using FlowJo V10 (Treestar). EC₅₀ values were calculated in GraphPad Prism 6 by curve fitting the data to log(agonist) vs. response (three parameters).

[0610] FIGS. 13A and 13B demonstrate that all the formats of SP34 bind to CD3ε Jurkat cells with similar EC₅₀ values.

### Example 6

### Binding of Activatable Anti-CD3ε Antibodies to CD3ε Jurkat Cells

[0611] To determine if the masking peptides described in the previous examples could inhibit binding in the SP34 scFv-Fc context, a flow cytometry-based binding assay was performed. Jurkat T cells were cultured and processed in FACS Buffer as described. About 100,000 Jurkats per well were transferred to a 96-well U-bottom plate, harvested, and re-suspended in 50 μL of primary antibody. Titrations started at either 1 μM or 333 nM followed by 3-fold serial dilutions in FACS Buffer. The following antibodies and activatable antibodies were tested: 15003 1204 SP34 LvHv Fc; 15860 1204 SP34 LvHv Fc; 15865 1204 SP34 LvHv, SP34 LvHv, 15003 1204 SP34 HvLv; 15860 1204 SP34 HvLv Fc; 15865 1204 SP34 HvLv, SP34 HvLv Fc, and mouse SP34.

[0612] Cells were incubated at 4° C. with shaking for about 1 hour, harvested, and washed with 3×200 μL of FACS Buffer. Jurkats treated with SP34 Fc fusions were resuspended in 50 μl of Alexa Fluor 647 conjugated anti-Human IgG Fc (1:100 dilution, Jackson ImmunoResearch, Product 109-606-008). Cells treated with mouse SP34 were resuspended in 50 μl Alexa Fluor 647 conjugated Anti-mouse IgG (1:100 dilution, Jackson ImmunoResearch, Product 715-605-150). Jurkats were incubated at 4° C. with shaking for about 30 min, harvested, washed with 3×200 μL of FACS Buffer, and resuspended in a final volume of 100 μL of FACS Buffer containing 2.5 μg/ml 7-AAD (BD Biosciences, Catalog 559925). Samples were collected on a MACSQuant® Analyzer 10 (Miltenyi) and the median fluorescence intensity (MFI) of viable cells was calculated using FlowJo V10 (Treestar). EC₅₀ values were calculated in GraphPad Prism 6 by curve fitting the data to log(agonist) vs. response (three parameters).

[0613] FIGS. 14A and 14B demonstrate that incorporation of the masking peptides into the SP34 scFv-Fc context to produce activatable antibodies shifted the EC₅₀ values for CD3ε binding from single digit to triple digit nM.

### Example 7

### Binding of Dually Masked Multispecific, Activatable Antibodies to EGFR+ HT-29 Cells and CD3ε+ Jurkat Cells

[0614] To determine if the CD3ε masking peptides described in the previous examples could inhibit binding in the context of an EGFR masked multispecific, activatable antibody, a flow cytometry-based binding assay was performed.

[0615] EGFR+ HT-29-luc2 (Caliper) were cultured in RPMI-1640+glutamax (Life Technologies, Catalog 72400-120), 10% Heat Inactivated-Fetal Bovine Serum (HI-FBS, Life Technologies, Catalog 10438-026), 100 U/ml penicillin, and 100 μg/ml streptomycin (Life Technologies, Catalog 15140-122) according to manufacturer guidelines. Cells were lifted with cell dissociation buffer (Sigma, Catalog C5789), washed, and re-suspended in 50 μL of primary antibody. Titrations started at the concentrations indicated in FIGS. 15A-15D followed by 3-fold serial dilutions in FACS Buffer. The following multispecific antibodies and multispecific, activatable antibodies were tested: CI005 (EGFR/hCD3), CI023 (M-EGFR/M-hCD3), CI024 (M-EGFR/M-hCD3), CI015 (EGFR/hCD3), CI011 (M-EGFR/M-hCD3), CI010 (M-EGFR/M-hCD3). Two versions of SP34 scFv are utilized, namely the scFv in CI005, CI023, CI024 versus the scFv in CI015, CI011, CI010. The binding specificity of the multispecific antibody is indicated by antigen name (in this example EGFR and CD3) and the letter M indicates masking of antigen binding.

[0616] HT29-luc2 cells were incubated at 4° C. with shaking for about 1 hour, harvested, and washed with 3×200 μL of FACS Buffer. Cells were resuspended in 50 μl of Alexa Fluor 647 conjugated anti-Human IgG Fc (1:100 dilution, Jackson ImmunoResearch, Product 109-606-008) and incubated at 4° C. with shaking for about 30 min. HT29-luc2 were harvested, washed with 3×200 μL of FACS Buffer, and resuspended in a final volume of 100 μL of FACS Buffer containing 2.5 μg/ml 7-AAD (BD Biosciences, Catalog 559925). Samples were collected on a MACSQuant® Analyzer 10 (Miltenyi) and the median fluorescence intensity (MFI) of viable cells was calculated using FlowJo V10 (Treestar). EC₅₀ values were calculated in GraphPad Prism 6 by curve fitting the data to log(agonist) vs. response (three parameters).

[0617] Binding of the multispecific antibodies and multispecific, activatable antibodies to CD3ε Jurkats were tested as previously described.

[0618] FIGS. 15A-15C demonstrate that incorporation of the CD3ε masking peptides into the EGFR masked multispecific activatable antibody shifted the EC₅₀ values for CD3ε binding from single digit to triple digit nM. This binding shift was evident in multispecific, activatable antibodies that utilize two versions of SP34 scFv (namely the scFv in CI005, CI023, CI024 versus the scFv in CI015, CI011, CI010). In addition, EGFR masking is still effective in the multispecific, activatable antibodies that are masked for both EGFR and CD3 binding.

### Example 8

### Cytotoxicity of Dually Masked Multispecific, Activatable Antibodies to EGFR+ HT-29 Cells and CD3ε+ Jurkat Cells

[0619] To determine if the CD3ε masking peptides described in the previous examples could function in the context of an EGFR masked multispecific, activatable antibody, a cytotoxicity assay was performed.

[0620] Human PBMCs were purchased as frozen aliquots (HemaCare, Catalog PB009C-1) or isolated from a buffy coat obtained from a healthy donor (Stanford Blood Center) via Ficoll density gradient centrifugation (REFERENCE=Isolation of mononuclear cells and granulocytes from human blood. Bøyum, A., Scand. J., Clin. Lab. Invest. 21 Suppl, 97, 77-89 (1968)). Human PBMCs were co-cultured in RPMI-1640+glutamax, 5% heat inactivated human serum (Sigma, Catalog H3667), and 100 U/ml penicillin, and 100 μg/ml streptomycin in a white wall 96 well plates with EGFR-expressing HT29-luc2 cells at a PBMC to HT29-luc ratio of 10:1. Titrations of the following multispecific antibodies and multispecific, activatable antibodies were tested: CI005 (EGFR/hCD3), CI023 (M-EGFR/M-hCD3), CI024 (M-EGFR/M-hCD3), CI011 (M-EGFR/M-hCD3), CI010 (M-EGFR/M-hCD3). In addition, EGFR antibody (CI012) and isotype were used as negative controls at a single concentration. The total volume after addition of effector cells, target cells, and antibody was 150 μL. After 48 hours, the luminogenic peptide substrate of the CytoTox-Glo™ Cytotoxicity Assay (Promega) was added directly to the plates to measure released protease activity. Luminescence was measured 50 min after substrate addition on the Infinite M200 Pro (Tecan). Results were expressed in luminescence after background subtraction of untreated values and plotted in Prism with curve fitting analysis log(agonist) vs. response (three parameters).

[0621] FIGS. 16A and 16B demonstrate that the EGFR and CD3ε masked multispecific, activatable antibodies shift the cytotoxicity EC₅₀ relative to an unmasked control. This shift was evident in multispecific, activatable antibodies that utilize two versions of SP34 scFv, namely the scFv in CI023 and CI024 versus the scFv in CI011 and CI010.

### Example 9

### Binding of Singly and Dually Masked Multispecific, Activatable Antibodies to EGFR+ HT-29 Cells and CD3ε+ Jurkat Cells

[0622] To determine if the CD3ε and EGFR masks could attenuate binding in a multispecific, activatable antibody, a flow cytometry assay was performed. Binding to CD3ε+ Jurkat cells and EGFR+ HT-29 cells was performed as previously described on the following multispecific antibody and multispecific, activatable antibodies: CI005 (EGFR/hCD3), CI007 (M-EGFR/hCD3), CI008 (EGFR/M1-hCD3), CI009 (EGFR/M2-hCD3), CI010 (M-EGFR/M1-hCD3), and CI011 (M-EGFR/M2-hCD3).

[0623] FIGS. 17A and 17B demonstrate that the EGFR mask can shift the EC₅₀ of EGFR binding in the presence (CI010, CI011) and absence (CI007) of the CD3ε masks. Both CD3ε masks can shift the EC₅₀ of CD3ε binding in the presence (CI010, CI011) and absence (CI008, C009) of the EGFR mask.

### Example 10

### EGFR Dependent Cytotoxicity of Singly and Dually Masked Multispecific, Activatable Antibodies

[0624] To determine if the CD3ε and EGFR masks could attenuate cell killing in a multispecific, activatable antibody, a cytotoxicity assay was performed. EGFR dependent cell killing was evaluated by co-culturing PBMCs and EGFR+ HT-29 luc cells as previously described. EGFR independent cell killing was evaluated by co-culturing PBMCs with the EGFR negative U266 cell line (ATCC, Catalog TIB-196). U266 cells were cultured according to ATCC guidelines in RPMI-1640+glutamax, 10% Heat Inactivated-Fetal Bovine Serum, 100 U/ml penicillin, and 100 μg/ml streptomycin. Titrations of the following multispecific antibody and multispecific, activatable antibodies were tested: CI005 (EGFR/hCD3), CI007 (M-EGFR/hCD3), CI009 (EGFR/M2-hCD3), CI011 (M-EGFR/M2-hCD3). Co-culture conditions and quantification of cytotoxicity is described in the previous example.

[0625] FIGS. 18A and 18B demonstrate that killing of EGFR+ HT29-luc2 cells is maximally attenuated by masking both EGFR and CD3 binding in the multispecific, activatable antibody. In contrast, killing of EGFR negative U266 cells was undetectable in identical co-culture conditions.

### Example 11

### EGFR Dependent Primary T Cell Activation of Singly and Dually Masked Multispecific, Activatable Antibodies

[0626] To determine if the CD3ε and EGFR masks could attenuate primary T cell activation in a multispecific, activatable antibody, a flow cytometry assay was performed. PBMC and EGFR+ HT-29 luc2 co-culture conditions are described in the previous example. After a 24 hour incubation, the culture was transferred to a U-bottom plate and the remaining cells were detached with 0.25% trypsin (Life Technologies, Catalog 25200-056). Trypsin activity was quenched by adding 3 volumes of FACS Buffer, and the cell suspension was transferred to the same U-bottom plate. After harvesting, the cells were resuspended in 50 μL of either an anti-CD69 PE/Anti-CD8 APC-Vio770 cocktail (anti-CD69 PE, BD Biosciences, Catalog 555531; anti-CD8 APC-Vio770, Miltenyi Biotec, Catalog 130-096-561), APC-Vio770 isotype control (Miltenyi Biotec, Catalog 130-099-637), or PE isotype control (BD BioSciences, Catalog 340761). All antibodies were used at the manufacturer's recommended concentrations. Cells were stained for 1 h at 4° C. with shaking, harvested and re-suspended in a final volume of 100 μL FACS Buffer with 2.5 μg/ml 7-AAD. Samples were collected on a MACSQuant® Analyzer 10 (Miltenyi) and activation was quantified in FlowJo V10 (Treestar) as the percentage of CD8+ T cells with expression of CD69 above the PE isotype control. EC₅₀ values were calculated in GraphPad Prism 6 by curve fitting the data to log(agonist) vs. response (three parameters).

[0627] FIG. 19 demonstrates that activation of primary CD8+ T cells is maximally attenuated by masking both EGFR and CD3 binding in the multispecific, activatable antibody.

### Example 12

### EGFR Independent Primary T Cell Activation of Singly and Dually Masked Multispecific, Activatable Antibodies

[0628] To determine if the CD3ε masks could attenuate EGFR independent activation in a multispecific, activatable antibody, a flow cytometry assay was performed. PBMC and EGFR negative U266 co-culture conditions are described in the previous example. Activation of primary CD8+ T cells was assessed by CD69 staining as previously described. The following multispecific antibody and multispecific, activatable antibodies were evaluated: CI005 (EGFR/hCD3), CI007 (M-EGFR/hCD3), CI009 (EGFR/M2-hCD3), CI011 (M-EGFR/M2-hCD3).

[0629] FIGS. 20A and 20B demonstrate that target-independent T cell activation by the unmasked bispecific antibody is only very minimal and that this low degree of activity is abrogated upon masking of the anti-CD3 moiety.

### Example 13

### uPA Digest of Multispecific, Activatable Antibodies Restores Binding to EGFR+ HT-29 Luc2 Cells and CD3+ Jurkat Cells and Cytotoxicity Against EGFR+ HT-29 Luc2 Cells

[0630] Activation of the multispecific activatable antibody was conducted as follows: multispecific activatable antibodies in PBS was cleaved by the addition of uPA (R&D Systems, Catalog 1310-SE) to a final concentration of about 1 μM. The digest was incubated at 37° C. overnight, and cleavage was confirmed by removing an aliquot for capillary electrophoresis analysis (GX-II Capillary Electrophoresis, Perkin Elmer) or SDS-PAGE. Protease and the cleaved masking moiety were removed by Protein A purification. Briefly, the digested sample was diluted to 2 ml with PBS and loaded onto equilibrated MabSelect SuRe™ beads (GE Healthcare Life Sciences, Product 11-0026-01 AD). Beads were washed with 5 column volumes (CV) of 1×PBS, followed by 5 CV of 5×PBS supplemented with 5% isopropyl alcohol (IPA), and finally with 5 CV of 1×PBS. Antibody was eluted with 10 CV of 0.1 M Glycine, pH 3.0, and fractions were neutralized with 1 M Tris, pH 8.0, pooled, concentrated and buffer exchanged into PBS. Binding to CD3ε+ Jurkat cells and EGFR+ HT-29 cells and cell killing against HT-29 luc2 cells was performed as previously described.

[0631] FIGS. 21A-21D demonstrate that uPA activation restores binding of the multispecific, activatable CI011 (M-EGFR/M-hCD3) antibody to both EGFR+ HT29-luc2 cells and CD3+ Jurkat cells. In addition, cell killing of all multispecific, activatable antibodies is restored by uPA activation.

### Example 14

### Dually Masked Multispecific, Activatable Antibodies Incorporating Different Substrates

[0632] To determine if different substrates impact EGFR dependent killing of dually masked, multispecific, activatable antibodies, a cytotoxicity assay was performed. Cell killing against HT-29 luc2 cells was performed as previously described.

[0633] FIG. 22 demonstrates that dually masked multispecific, activatable antibodies that contain different substrates shift EC₅₀ cytotoxicity.

### Example 15

### Multispecific Antibodies and Multispecific Activatable Antibodies of the Embodiments Prevent HT-29Luc2 Tumor Growth in Mice

[0634] In this example, multispecific antibodies and multispecific activatable antibodies targeting EGFR and CD3ε were analyzed for ability to prevent growth of HT-29Luc2 xenograft tumors in immune-deficient NOD-scid mice.

[0635] The human colon cancer cell line HT-29Luc2 was obtained from Perkin Elmer, Inc., Waltham, Mass. (formerly Caliper Life Sciences, Inc.). The fresh, human PBMCs and PBMCs enriched for T cells were obtained from a human donor through Hemacare, Inc., Van Nuys, Calif. and shipped overnight to CytomX. The HT-29Luc2 cells were implanted subcutaneously along with human PBMCs or fresh PBMCs enriched for T cells into the right flank of NOD scid (NOD.CB17-Prkdc^{scid}/J) mice (Jackson Laboratory, Bar Harbor, Me.). The HT-29Luc2 cells were grown in McCoy's 5a medium (ATCC, Manassas, Va.), with 10% fetal bovine serum (Gibco-brand, ThermoFisher, Inc. Waltham, Mass.) at 37° C. in an atmosphere of 5% CO₂ in air. The tumor cells were routinely sub-cultured twice weekly. Cells were harvested during the logarithmic growth period and kept at ambient temperature for tumor induction.

[0636] In one prevention study, mice were inoculated subcutaneously with 100 μL of a cell suspension containing 2×10⁶ tumor cells with or without 2×10⁶ fresh, unstimulated PBMC (Day 0). On the same day, mice received a first dose of test or control article by intravenous injection (Day 0). Tumor volume was measured twice weekly in two dimensions using a digital caliper, and the volume was expressed in mm³ using the formula: V=0.5 a×b² where a and b are the long and short diameters of the tumor, respectively.

[0637] The mice were grouped and dosed as set forth in Table 13.

TABLE 13
Groups and doses for HT-29Luc2 xenograft study.

| | | | | | Dose | |
|---|---|---|---|---|---|---|
| Group | Count | Tumor | PBMC | Treatment | (mg/kg) | Schedule |
| 1 | 8 | HT-29Luc2 | — | PBS | — | q7dx2, iv |
| 2 | 8 | HT-29Luc2 | Donor A | PBS | — | q7dx2, iv |
| 3 | 8 | HT-29Luc2 | Donor A | CI005 | 0.10 | q7dx2, iv |
| 4 | 8 | HT-29Luc2 | Donor A | CI059 | 0.5* | qdx8, iv |
| | | | | (BiTE) | | |

*BiTE was dosed at 0.5 mg/kg/day.

[0638] FIG. 23, which plots tumor volume versus days post initial dose, demonstrated that multispecific antibody CI005 at 0.1 mg/kg dosed twice 7 days apart and CI059 (BiTE) at 0.5 mg/kg/day for 8 consecutive days prevented the growth of HT-29Luc2 xenograft tumors.

[0639] In a separate study, multispecific antibody CI048 and multispecific activatable antibody CI011 targeting EGFR and CD3ε were tested for the ability to prevent or inhibit the growth of HT-29Luc2 xenograft tumor using a method similar to that described above. Groups and doses are set forth in Table 14. The effector cells in this study were fresh, unstimulated CD3+ T cells enriched from PBMCs, and were co-injected in a 1:1 ratio of effector cell to tumor cell.

TABLE 14
Groups and doses for HT-29Luc2 xenograft prevention study.

| | | | | Route/volume | | | |
|---|---|---|---|---|---|---|---|
| | | | Effector | of | | Dose | |
| Group | Count | Tumor | cells | Administration | Treatment | (mg/kg) | Schedule |
| 1 | 8 | HT-29Luc2 | Donor A | SC, co- | PBS | — | d0, d7 |
| 2 | 9 | HT-29Luc2 | Donor A | administration | CI048 | 0.10 | d0, d7 |
| 3 | 10 | HT-29Luc2 | Donor A | with tumor on | CI011 | 0.10 | d0, d7 |
| | | | | d0 with IV | | | |
| | | | | administration | | | |
| | | | | of treatment | | | |
| | | | | 5 ml/kg | | | |

[0640] FIG. 24, which plots tumor volume versus days post initial dose, demonstrated that CI048 multispecific antibody limited establishment of HT-29Luc2 xenograft tumors and CI011 multispecific activatable antibody inhibited the growth of HT-29Luc2 xenograft tumors. The difference in effect between PBS and CI011 on Day 26 is statistically significant (p<0.05).

### Example 16

### Multispecific Antibodies and Multispecific Activatable Antibodies of the Embodiments Induced Regression of Established HT-29Luc2 Tumors in Mice

[0641] In this example, multispecific antibodies and multispecific activatable antibodies targeting EGFR and CD3ε were analyzed for the ability to produce regression or reduced growth of established HT-29Luc2 xenograft tumors in human T-cell engrafted NSG mice.

[0642] The human colon cancer cell line HT-29Luc2 was obtained from Perkin Elmer, Inc., Waltham, Mass. (formerly Caliper Life Sciences, Inc.) and cultured as described in Example 15. Purified, frozen human PBMCs were obtained from a human donor through Hemacare, Inc., Van Nuys, Calif. NSG (NOD.Cg-Prkdcscid Il2rg^{tm1Wj1}/SzJ) mice were obtained from The Jackson Laboratories, Bar Harbor, Me.

[0643] In preparation for the tumor intervention study, each mouse was inoculated subcutaneously at the right flank with 2×10⁶ HT-29Luc2 cells in 100 μL RPMI+Glutamax, serum-free medium. Previously frozen PBMCs from a single donor (“A”) were analyzed to determine the percent CD3+ T cells. This value was used to calculate the total number of PBMCs needed to achieve a CD3+ T cell to tumor cell ratio of 2:1. This total number of PBMCs (10.2 million) was injected into the peritoneum of each mouse on the day of tumor cell implantation.

[0644] Blood (˜100 μl) was collected from all mice 11 days post PBMC inoculation to evaluate extent of human T cell engraftment within each mouse by flow cytometry. Whole blood (anti-coagulant, lithium heparin) was assayed for presence of human CD3+ with percent CD4+ and CD8+ T cells.

[0645] Tumor volume and body weights were measured twice weekly and tumor volumes calculated as described in Example 15. 13 days after tumor inoculation, mice with adequate T cell engraftment and with tumors in the target size range (50-100 mm³; average ˜70 mm³) were randomized into groups of 8. The following day, mice assigned to treatment groups were dosed IV (5 mL/kg) according to Table 15.

TABLE 15
Groups and doses for dose dependent HT-29Luc2 xenograft study.

| | | | | Route of | Route of | | | |
|---|---|---|---|---|---|---|---|---|
| | | | | Administration | Administration | | Dose | |
| Group | Count | Tumor¹ | Effector cells^{2, 3} | Effector cells | compound | Treatment | (mg/kg) | Schedule |
| 1 | 8 | HT-29Luc2 | 10.2 million/mouse | IP | IV | PBS | — | d1, d8, |
| 2 | 8 | HT-29Luc2 | 10.2 million/mouse | | | CI048 | 0.003 | d15 |
| 3 | 8 | HT-29Luc2 | 10.2 million/mouse | | | CI048 | 0.010 | |
| 4 | 8 | HT-29Luc2 | 10.2 million/mouse | | | CI048 | 0.030 | |
| 5 | 8 | HT-29Luc2 | 10.2 million/mouse | | | CI048 | 0.10 | |
| 6 | 8 | HT-29Luc2 | 10.2 million/mouse | | | CI048 | 0.30 | |
| 7 | 8 | HT-29Luc2 | 10.2 million/mouse | | | CI040 | 0.10 | |

¹2 million HT29-Luc2 cells were implanted.
²PBMC number were normalized to CD3+ number and with a ratio of 1:2 tumor:CD3+ T cell.
³frozen PBMCs were allowed to engraft without pre-stimulation for ^{~}13 days.

[0646] FIG. 25, which plots tumor volume versus days post initial treatment dose, demonstrated a dose-dependent effect of CI048 multispecific antibody on the growth of HT-29Luc2 xenograft tumors. The most efficacious dose of CI048 was 0.3 mg/kg, resulting in sustained, complete tumor regression in 100% mice. CI048 at 0.1 mg/kg was also highly efficacious, with a majority of mice exhibiting tumor regression.

[0647] FIG. 26, which plots tumor volume versus days post initial treatment dose, demonstrated that CI048 multispecific antibody at 0.3 mg/kg eliminated HT-29Luc2 xenograft tumors and the CI040 multispecific activatable antibody at 0.1 mg/kg is less efficacious than CI048 but limited the growth of HT-29Luc2 xenograft tumors relative to a PBS control.

[0648] Two additional efficacy studies were set up using unassigned animals from the same pool of HT-29Luc2 tumor-bearing, human T cell engrafted NSG mice. The first study was initiated 18 days post tumor implantation with an average starting tumor volume of 107 mm³. This study compared the activities of CI048 multispecific antibody and CI040 multispecific activatable antibody. The mice were grouped and dosed as set forth in Table 16, Groups 1-4. The second study was initiated 26 days post tumor implantation with an average starting tumor volume of 190 mm³. This study evaluated the efficacy of CI011 multispecific activatable antibody. The mice were grouped and dosed IV as set forth in Table 16, Groups 5 and 6.

TABLE 16
Groups and doses for additional dose dependent HT-29Luc2 xenograft add-on studies.

| | | | | Route of | Route of | | | |
|---|---|---|---|---|---|---|---|---|
| | | | | Administration | Administration | | Dose | |
| Group | Count | Tumor¹ | Effector cells^{2, 3} | Effector cells | compound | Treatment | (mg/kg) | Schedule |
| 1 | 7 | HT-29Luc2 | 10.2 million/mouse | IP | IV | PBS | — | d1, d8, |
| 2 | 7 | HT-29Luc2 | 10.2 million/mouse | | | CI048 | 0.30 | d15, d22 |
| 3 | 7 | HT-29Luc2 | 10.2 million/mouse | | | CI040 | 0.30 | |
| 4 | 7 | HT-29Luc2 | 10.2 million/mouse | | | CI040 | 1.0 | |
| 6 | 4 | HT-29Luc2 | 10.2 million/mouse | | | PBS | — | d1, d8 |
| 7 | 4 | HT-29Luc2 | 10.2 million/mouse | | | CI011 | 1.0 | |

¹2 million HT-29Luc2 cells were implanted.
²PBMC number were normalized to CD3+ number and with a ratio of 1:2 tumor:CD3+ T cell.
³frozen PBMCs were allowed to engraft without pre-stimulation for ^{~}19-21 days.

[0649] FIG. 27, which plots tumor volume versus days post initial treatment dose, demonstrated that the CI040 multispecific activatable antibody at 1.0 mg/kg and the CI048 multispecific antibody at 0.3 mg/kg produced complete tumor regression in 100% of treated mice. Tumor regression was seen in a majority of mice dosed with 0.3 mg/kg CI040.

[0650] FIG. 28, which plots tumor volume versus days post initial treatment dose, demonstrated CI011 multispecific activatable antibody at 1.0 mg/kg significantly inhibited HT-29Luc2 xenograft tumor growth relative to a vehicle control (p<0.05).

### Example 17

### Maximum Tolerated Dose (MTD) Determination for a Multispecific Antibody and Multispecific Activatable Antibodies in Cynomolgus Monkeys

[0651] In this example, an escalating dose study design was used to establish the maximum tolerated dose of CI048 EGFRxCD3ε multispecific antibody and CI011 and CI040, two multispecific activatable antibodies following a single IV bolus administration to naïve male cynomolgus monkeys. The monkeys were of Cambodian origin and ranged in weight from 2.5 to 4 kg. CI011 and CI040 varied only in the amino acid sequence of the protease-cleavable site. CI048, CI011 and CI040 were each administered to one animal per dose level beginning at 0.1 micrograms/kg (μg/kg) for CI048 and at 60 μg/kg for CI011 and CI040. The dose was escalated in 2 to 10-fold increments until a MTD for each article was reached or exceeded. One additional animal was then used to confirm the MTD. Each study animal was dosed once and monitored for a minimum of 7 days. Tolerability was evaluated based on clinical signs, body weight, food consumption and laboratory analyses that included serum chemistry and hematology. Blood was collected for standard serum chemistry and hematology analysis once during acclimation and at 48 h and 7 days post dose.

[0652] Abnormal clinical signs including emesis, hunching and reduced food intake were observed with the unmasked CI048 multispecific antibody at doses of 10 μg/kg and above, and with CI011 or CI040 multispecific activatable antibodies at doses ≧200 μg/kg. At the MTDs of 20 μg/kg for CI048, ≧200 μg/kg for CI040 and ≧600 μg/kg for CI011, these findings, when present, were transient and generally confined to the 48 hr post-dose period. Serum chemistry findings at the MTD included mild to moderate elevations of alanine transaminase (ALT, a liver enzyme marker found in serum upon liver cell lysis) at 48 hr that were fully reversed by Day 8. A single animal dosed with CI048 at 60 μg/kg, demonstrated more severe and protracted clinical signs, correlating with substantially elevated ALT, AST, bilirubin and blood urea nitrogen at 48 hr post dose. This animal also had marked increases in serum cytokines including IL-6, IFN-gamma and TNF-alpha at 1 or 4 hr post dose, and a massively expanded lymphocyte population on Day 8. The findings of liver and kidney injury at CI048 doses exceeding the MTD are similar to those noted by Lutterbuese and co-workers in a study with an EGFR×CD3 bispecific molecule (PNAS 2010, vol. 107(28) 12605-12610) and may be attributable to T cell-mediated tissue injury.

[0653] FIG. 29 depicts 48 hr post-dose serum concentration of alanine aminotransferase (ALT) as a function of test article dose. A marked increase in ALT was noted at 60 μg/kg CI048 multispecific antibody. Re-dosing of CI048 at 20 μg/kg established the tolerated dose at 20 μg/kg. Administration of CI011 and CI040 multispecific activatable antibodies at doses of 600 μg/kg resulted in serum ALT levels that were comparable to serum ALT concentrations associated with 10-20 μg/kg CI048.

### Example 18

### Binding of Dually Masked Multispecific Activatable Antibodies to EGFR+HT-29 Cells and Mouse CD3ε+ TK1 Cells

[0654] To determine if mouse CD3ε and EGFR masks could attenuate binding in a multispecific activatable antibody, a flow cytometry assay was performed. Mouse CD3ε+ TK1 cells (ATCC, Catalog CRL-2396) were cultured in RPMI-1640+glutamax, 10% Heat Inactivated-Fetal Bovine Serum, 100 U/ml penicillin, and 100 μg/ml streptomycin according to ATCC guidelines. Binding to mouse CD3ε+ TK1 cells and EGFR+ HT-29 cells was performed as previously described on the following multispecific antibody and multispecific activatable antibodies: CI052 (EGFR/mCD3), CI053 (M-EGFR/M01-mCD3), CI054 (M-EGFR/M02-mCD3), CI055 (M-EGFR/M03-mCD3), CI056 (M-EGFR/M04-mCD3), CI049 (M-EGFR/M05-mCD3), CI050 (M-EGFR/M06-mCD3), CI051 (M-EGFR/M07-mCD3), CI057 (M-EGFR/M08-mCD3), and CI058 (M-EGFR/M09/mCD3). FIG. 30 demonstrates that incorporation of the mouse CD3ε masks into the EGFR masked multispecific activatable antibody shifted the EC₅₀ values for mouse CD3ε binding while retaining effective EGFR masking.

### Example 19

### Characterization of IL6R Targeting Dually Masked Multispecific Activatable Antibodies

[0655] To determine if the CD3ε and IL6R masks of a multispecific activatable antibody could attenuate cell killing, a cytotoxicity assay was performed. Cell killing was evaluated by co-culturing purified human CD8+ cells and IL6R+Molp-8 cells in a 6 to 1 ratio. Human CD8+ T cells were isolated from frozen PBMCs by negative selection using the Dynabeads® Untouched™ Human CD8 T Cells Kit (Life Technologies, Catalog 11348D). Molp-8 cells (DSMZ, Catalog ACC 569) were cultured according to DSMZ guidelines in RPMI-1640+glutamax, 20% Heat Inactivated-Fetal Bovine Serum, 100 U/ml penicillin, and 100 μg/ml streptomycin. Titrations of the following multispecific antibody and multispecific, activatable antibodies were tested: CI026 (IL6R/hCD3), CI027 (IL6R/M-hCD3), CI036 (M-IL6R/hCD3) and CI029 (M-IL6R/M-hCD3). Co-culture conditions and quantification of cytotoxicity is described in the previous example.

[0656] FIG. 31 demonstrates that killing of IL6R+Molp-8 cells is maximally attenuated by masking both IL6R and CD3 binding in the multispecific, activatable antibody.

### Other Embodiments

[0657] While the invention has been described in conjunction with the detailed description thereof, the foregoing description is intended to illustrate and not limit the scope of the disclosure, which is defined by the scope of the appended claims. Other aspects, advantages, and modifications are within the scope of the following claims.

The application's sequence listing, which the Patent Office published only in electronic form, follows.

SEQUENCE LISTING (926 sequences)

SEQ ID NO: 1 - DNA, 327 bp, Artificial Sequence
  Synthetic polynucleotide
caggctgtcgtgacacaggaaagcgccctgaccaccagccctggcgagacagtgaccctgacctgcagatctagcacaggcgccgtgaccacaagcaactacgccaactgggtgcaggaaaagcccgaccacctgttcaccggcctgatcggcggcaccaacaaaagggctccaggcgtgccagccagattcagcggcagcctgattggcgataaggccgccctgacaatcactggcgcccagaccgaggacgaggccatctacttttgcgccctgtggtacagcaacctgtgggtgttcggcggaggcaccaagctgacagtgctg

SEQ ID NO: 2 - protein, 109 aa, Artificial Sequence
  Synthetic polypeptide
QAVVTQESALTTSPGETVTLTCRSSTGAVTTSNYANWVQEKPDHLFTGLIGGTNKRAPGVPARFSGSLIGDKAALTITGAQTEDEAIYFCALWYSNLWVFGGGTKLTVL

SEQ ID NO: 3 - DNA, 375 bp, Artificial Sequence
  Synthetic polynucleotide
gaagtgcagctggtggaatctggcggcggactggtgcagcctaagggctctctgaagctgagctgtgccgccagcggcttcaccttcaacacctacgccatgaattgggtgcgccaggcccctggcaagggactggaatgggtggcccggatcagaagcaagtacaacaattacgccacctactacgccgacagcgtgaaggaccggttcaccatcagccgggacgacagccagagcatcctgtatctgcagatgaacaacctgaaaaccgaggacaccgccatgtactactgcgtgcggcacggcaacttcggcaacagctatgtgtcttggtttgcctactggggccagggcaccctcgtgacagtgtctgct

SEQ ID NO: 4 - protein, 125 aa, Artificial Sequence
  Synthetic polypeptide
EVQLVESGGGLVQPKGSLKLSCAASGFTFNTYAMNWVRQAPGKGLEWVARIRSKYNNYATYYADSVKDRFTISRDDSQSILYLQMNNLKTEDTAMYYCVRHGNFGNSYVSWFAYWGQGTLVTVSA

SEQ ID NO: 5 - DNA, 747 bp, Artificial Sequence
  Synthetic polynucleotide
caggctgtcgtgacacaggaaagcgccctgaccaccagccctggcgagacagtgaccctgacctgcagatctagcacaggcgccgtgaccacaagcaactacgccaactgggtgcaggaaaagcccgaccacctgttcaccggcctgatcggcggcaccaacaaaagggctccaggcgtgccagccagattcagcggcagcctgattggcgataaggccgccctgacaatcactggcgcccagaccgaggacgaggccatctacttttgcgccctgtggtacagcaacctgtgggtgttcggcggaggcaccaagctgacagtgctgggaggcggaggatctggcggaggcggaagtggcggagggggatctgaagtgcagctggtggaatctggcggcggactggtgcagcctaagggctctctgaagctgagctgtgccgccagcggcttcaccttcaacacctacgccatgaattgggtgcgccaggcccctggcaagggactggaatgggtggcccggatcagaagcaagtacaacaattacgccacctactacgccgacagcgtgaaggaccggttcaccatcagccgggacgacagccagagcatcctgtatctgcagatgaacaacctgaaaaccgaggacaccgccatgtactactgcgtgcggcacggcaacttcggcaacagctatgtgtcttggtttgcctactggggccagggcaccctcgtgacagtgtctgct

SEQ ID NO: 6 - protein, 249 aa, Artificial Sequence
  Synthetic polypeptide
QAVVTQESALTTSPGETVTLTCRSSTGAVTTSNYANWVQEKPDHLFTGLIGGTNKRAPGVPARFSGSLIGDKAALTITGAQTEDEAIYFCALWYSNLWVFGGGTKLTVLGGGGSGGGGSGGGGSEVQLVESGGGLVQPKGSLKLSCAASGFTFNTYAMNWVRQAPGKGLEWVARIRSKYNNYATYYADSVKDRFTISRDDSQSILYLQMNNLKTEDTAMYYCVRHGNFGNSYVSWFAYWGQGTLVTVSA

SEQ ID NO: 7 - DNA, 1455 bp, Artificial Sequence
  Synthetic polynucleotide
caggctgtcgtgacacaggaaagcgccctgaccaccagccctggcgagacagtgaccctgacctgcagatctagcacaggcgccgtgaccacaagcaactacgccaactgggtgcaggaaaagcccgaccacctgttcaccggcctgatcggcggcaccaacaaaagggctccaggcgtgccagccagattcagcggcagcctgattggcgataaggccgccctgacaatcactggcgcccagaccgaggacgaggccatctacttttgcgccctgtggtacagcaacctgtgggtgttcggcggaggcaccaagctgacagtgctgggaggcggaggatctggcggaggcggaagtggcggagggggatctgaagtgcagctggtggaatctggcggcggactggtgcagcctaagggctctctgaagctgagctgtgccgccagcggcttcaccttcaacacctacgccatgaattgggtgcgccaggcccctggcaagggactggaatgggtggcccggatcagaagcaagtacaacaattacgccacctactacgccgacagcgtgaaggaccggttcaccatcagccgggacgacagccagagcatcctgtatctgcagatgaacaacctgaaaaccgaggacaccgccatgtactactgcgtgcggcacggcaacttcggcaacagctatgtgtcttggtttgcctactggggccagggcaccctcgtgacagtgtctgctggcggctccctggaccctaagtcatctgacaaaactcacacatgcccaccgtgcccagcacctgaactcctggggggaccgtcagtcttcctcttccccccaaaacccaaggacaccctcatgatctcccggacccctgaggtcacatgcgtggtggtggacgtgagccacgaagaccctgaggtcaagttcaactggtacgtggacggcgtggaggtgcataatgccaagacaaagccgcgggaggagcagtacaacagcacgtaccgtgtggtcagcgtcctcaccgtcctgcaccaggactggctgaatggcaaggagtacaagtgcaaggtctccaacaaagccctcccagcccccatcgagaaaaccatctccaaagccaaagggcagccccgagaaccacaggtgtacaccctgcccccatcccgggaggagatgaccaagaaccaggtcagcctgacctgcctggtcaaaggcttctatcccagcgacatcgccgtggagtgggagagcaatgggcagccggagaacaactacaagaccacgcctcccgtgctggactccgacggctccttcttcctctacagcaagctcaccgtggacaagagcaggtggcagcaggggaacgtcttctcatgctccgtgatgcatgaggctctgcacaaccactacacgcagaagagcctctccctgtctccgggtaaa

SEQ ID NO: 8 - protein, 485 aa, Artificial Sequence
  Synthetic polypeptide
QAVVTQESALTTSPGETVTLTCRSSTGAVTTSNYANWVQEKPDHLFTGLIGGTNKRAPGVPARFSGSLIGDKAALTITGAQTEDEAIYFCALWYSNLWVFGGGTKLTVLGGGGSGGGGSGGGGSEVQLVESGGGLVQPKGSLKLSCAASGFTFNTYAMNWVRQAPGKGLEWVARIRSKYNNYATYYADSVKDRFTISRDDSQSILYLQMNNLKTEDTAMYYCVRHGNFGNSYVSWFAYWGQGTLVTVSAGGSLDPKSSDKTHTCPPCPAPELLGGPSVFLFPPKPKDTLMISRTPEVTCVVVDVSHEDPEVKFNWYVDGVEVHNAKTKPREEQYNSTYRVVSVLTVLHQDWLNGKEYKCKVSNKALPAPIEKTISKAKGQPREPQVYTLPPSREEMTKNQVSLTCLVKGFYPSDIAVEWESNGQPENNYKTTPPVLDSDGSFFLYSKLTVDKSRWQQGNVFSCSVMHEALHNHYTQKSLSLSPGK

SEQ ID NO: 9 - DNA, 879 bp, Artificial Sequence
  Synthetic polynucleotide
caaggccagtctggccaaggttatcggtggggttgcgagtggaattgcggtgggattactactggctcgagcggtggcagcggtggctctggtggtctgagcggccgttccgataatcatggcggcggttctcaggctgtcgtgacacaggaaagcgccctgaccaccagccctggcgagacagtgaccctgacctgcagatctagcacaggcgccgtgaccacaagcaactacgccaactgggtgcaggaaaagcccgaccacctgttcaccggcctgatcggcggcaccaacaaaagggctccaggcgtgccagccagattcagcggcagcctgattggcgataaggccgccctgacaatcactggcgcccagaccgaggacgaggccatctacttttgcgccctgtggtacagcaacctgtgggtgttcggcggaggcaccaagctgacagtgctgggaggcggaggatctggcggaggcggaagtggcggagggggatctgaagtgcagctggtggaatctggcggcggactggtgcagcctaagggctctctgaagctgagctgtgccgccagcggcttcaccttcaacacctacgccatgaattgggtgcgccaggcccctggcaagggactggaatgggtggcccggatcagaagcaagtacaacaattacgccacctactacgccgacagcgtgaaggaccggttcaccatcagccgggacgacagccagagcatcctgtatctgcagatgaacaacctgaaaaccgaggacaccgccatgtactactgcgtgcggcacggcaacttcggcaacagctatgtgtcttggtttgcctactggggccagggcaccctcgtgacagtgtctgct

SEQ ID NO: 10 - protein, 293 aa, Artificial Sequence
  Synthetic polypeptide
QGQSGQGYRWGCEWNCGGITTGSSGGSGGSGGLSGRSDNHGGGSQAVVTQESALTTSPGETVTLTCRSSTGAVTTSNYANWVQEKPDHLFTGLIGGTNKRAPGVPARFSGSLIGDKAALTITGAQTEDEAIYFCALWYSNLWVFGGGTKLTVLGGGGSGGGGSGGGGSEVQLVESGGGLVQPKGSLKLSCAASGFTFNTYAMNWVRQAPGKGLEWVARIRSKYNNYATYYADSVKDRFTISRDDSQSILYLQMNNLKTEDTAMYYCVRHGNFGNSYVSWFAYWGQGTLVTVSA

SEQ ID NO: 11 - DNA, 1587 bp, Artificial Sequence
  Synthetic polynucleotide
caaggccagtctggccaaggttatcggtggggttgcgagtggaattgcggtgggattactactggctcgagcggtggcagcggtggctctggtggtctgagcggccgttccgataatcatggcggcggttctcaggctgtcgtgacacaggaaagcgccctgaccaccagccctggcgagacagtgaccctgacctgcagatctagcacaggcgccgtgaccacaagcaactacgccaactgggtgcaggaaaagcccgaccacctgttcaccggcctgatcggcggcaccaacaaaagggctccaggcgtgccagccagattcagcggcagcctgattggcgataaggccgccctgacaatcactggcgcccagaccgaggacgaggccatctacttttgcgccctgtggtacagcaacctgtgggtgttcggcggaggcaccaagctgacagtgctgggaggcggaggatctggcggaggcggaagtggcggagggggatctgaagtgcagctggtggaatctggcggcggactggtgcagcctaagggctctctgaagctgagctgtgccgccagcggcttcaccttcaacacctacgccatgaattgggtgcgccaggcccctggcaagggactggaatgggtggcccggatcagaagcaagtacaacaattacgccacctactacgccgacagcgtgaaggaccggttcaccatcagccgggacgacagccagagcatcctgtatctgcagatgaacaacctgaaaaccgaggacaccgccatgtactactgcgtgcggcacggcaacttcggcaacagctatgtgtcttggtttgcctactggggccagggcaccctcgtgacagtgtctgctggcggctccctggaccctaagtcatctgacaaaactcacacatgcccaccgtgcccagcacctgaactcctggggggaccgtcagtcttcctcttccccccaaaacccaaggacaccctcatgatctcccggacccctgaggtcacatgcgtggtggtggacgtgagccacgaagaccctgaggtcaagttcaactggtacgtggacggcgtggaggtgcataatgccaagacaaagccgcgggaggagcagtacaacagcacgtaccgtgtggtcagcgtcctcaccgtcctgcaccaggactggctgaatggcaaggagtacaagtgcaaggtctccaacaaagccctcccagcccccatcgagaaaaccatctccaaagccaaagggcagccccgagaaccacaggtgtacaccctgcccccatcccgggaggagatgaccaagaaccaggtcagcctgacctgcctggtcaaaggcttctatcccagcgacatcgccgtggagtgggagagcaatgggcagccggagaacaactacaagaccacgcctcccgtgctggactccgacggctccttcttcctctacagcaagctcaccgtggacaagagcaggtggcagcaggggaacgtcttctcatgctccgtgatgcatgaggctctgcacaaccactacacgcagaagagcctctccctgtctccgggtaaa

SEQ ID NO: 12 - protein, 529 aa, Artificial Sequence
  Synthetic polypeptide
QGQSGQGYRWGCEWNCGGITTGSSGGSGGSGGLSGRSDNHGGGSQAVVTQESALTTSPGETVTLTCRSSTGAVTTSNYANWVQEKPDHLFTGLIGGTNKRAPGVPARFSGSLIGDKAALTITGAQTEDEAIYFCALWYSNLWVFGGGTKLTVLGGGGSGGGGSGGGGSEVQLVESGGGLVQPKGSLKLSCAASGFTFNTYAMNWVRQAPGKGLEWVARIRSKYNNYATYYADSVKDRFTISRDDSQSILYLQMNNLKTEDTAMYYCVRHGNFGNSYVSWFAYWGQGTLVTVSAGGSLDPKSSDKTHTCPPCPAPELLGGPSVFLFPPKPKDTLMISRTPEVTCVVVDVSHEDPEVKFNWYVDGVEVHNAKTKPREEQYNSTYRVVSVLTVLHQDWLNGKEYKCKVSNKALPAPIEKTISKAKGQPREPQVYTLPPSREEMTKNQVSLTCLVKGFYPSDIAVEWESNGQPENNYKTTPPVLDSDGSFFLYSKLTVDKSRWQQGNVFSCSVMHEALHNHYTQKSLSLSPGK

SEQ ID NO: 13 - DNA, 879 bp, Artificial Sequence
  Synthetic polynucleotide
caaggccagtctggccaatggtattcgggtgggtgcgaggctttttgcggtattttgtcgtcgggctcgagcggtggcagcggtggctctggtggtctgagcggccgttccgataatcatggcggcggttctcaggctgtcgtgacacaggaaagcgccctgaccaccagccctggcgagacagtgaccctgacctgcagatctagcacaggcgccgtgaccacaagcaactacgccaactgggtgcaggaaaagcccgaccacctgttcaccggcctgatcggcggcaccaacaaaagggctccaggcgtgccagccagattcagcggcagcctgattggcgataaggccgccctgacaatcactggcgcccagaccgaggacgaggccatctacttttgcgccctgtggtacagcaacctgtgggtgttcggcggaggcaccaagctgacagtgctgggaggcggaggatctggcggaggcggaagtggcggagggggatctgaagtgcagctggtggaatctggcggcggactggtgcagcctaagggctctctgaagctgagctgtgccgccagcggcttcaccttcaacacctacgccatgaattgggtgcgccaggcccctggcaagggactggaatgggtggcccggatcagaagcaagtacaacaattacgccacctactacgccgacagcgtgaaggaccggttcaccatcagccgggacgacagccagagcatcctgtatctgcagatgaacaacctgaaaaccgaggacaccgccatgtactactgcgtgcggcacggcaacttcggcaacagctatgtgtcttggtttgcctactggggccagggcaccctcgtgacagtgtctgct

SEQ ID NO: 14 - protein, 293 aa, Artificial Sequence
  Synthetic polypeptide
QGQSGQWYSGGCEAFCGILSSGSSGGSGGSGGLSGRSDNHGGGSQAVVTQESALTTSPGETVTLTCRSSTGAVTTSNYANWVQEKPDHLFTGLIGGTNKRAPGVPARFSGSLIGDKAALTITGAQTEDEAIYFCALWYSNLWVFGGGTKLTVLGGGGSGGGGSGGGGSEVQLVESGGGLVQPKGSLKLSCAASGFTFNTYAMNWVRQAPGKGLEWVARIRSKYNNYATYYADSVKDRFTISRDDSQSILYLQMNNLKTEDTAMYYCVRHGNFGNSYVSWFAYWGQGTLVTVSA

SEQ ID NO: 15 - DNA, 1587 bp, Artificial Sequence
  Synthetic polynucleotide
caaggccagtctggccaatggtattcgggtgggtgcgaggctttttgcggtattttgtcgtcgggctcgagcggtggcagcggtggctctggtggtctgagcggccgttccgataatcatggcggcggttctcaggctgtcgtgacacaggaaagcgccctgaccaccagccctggcgagacagtgaccctgacctgcagatctagcacaggcgccgtgaccacaagcaactacgccaactgggtgcaggaaaagcccgaccacctgttcaccggcctgatcggcggcaccaacaaaagggctccaggcgtgccagccagattcagcggcagcctgattggcgataaggccgccctgacaatcactggcgcccagaccgaggacgaggccatctacttttgcgccctgtggtacagcaacctgtgggtgttcggcggaggcaccaagctgacagtgctgggaggcggaggatctggcggaggcggaagtggcggagggggatctgaagtgcagctggtggaatctggcggcggactggtgcagcctaagggctctctgaagctgagctgtgccgccagcggcttcaccttcaacacctacgccatgaattgggtgcgccaggcccctggcaagggactggaatgggtggcccggatcagaagcaagtacaacaattacgccacctactacgccgacagcgtgaaggaccggttcaccatcagccgggacgacagccagagcatcctgtatctgcagatgaacaacctgaaaaccgaggacaccgccatgtactactgcgtgcggcacggcaacttcggcaacagctatgtgtcttggtttgcctactggggccagggcaccctcgtgacagtgtctgctggcggctccctggaccctaagtcatctgacaaaactcacacatgcccaccgtgcccagcacctgaactcctggggggaccgtcagtcttcctcttccccccaaaacccaaggacaccctcatgatctcccggacccctgaggtcacatgcgtggtggtggacgtgagccacgaagaccctgaggtcaagttcaactggtacgtggacggcgtggaggtgcataatgccaagacaaagccgcgggaggagcagtacaacagcacgtaccgtgtggtcagcgtcctcaccgtcctgcaccaggactggctgaatggcaaggagtacaagtgcaaggtctccaacaaagccctcccagcccccatcgagaaaaccatctccaaagccaaagggcagccccgagaaccacaggtgtacaccctgcccccatcccgggaggagatgaccaagaaccaggtcagcctgacctgcctggtcaaaggcttctatcccagcgacatcgccgtggagtgggagagcaatgggcagccggagaacaactacaagaccacgcctcccgtgctggactccgacggctccttcttcctctacagcaagctcaccgtggacaagagcaggtggcagcaggggaacgtcttctcatgctccgtgatgcatgaggctctgcacaaccactacacgcagaagagcctctccctgtctccgggtaaa

SEQ ID NO: 16 - protein, 529 aa, Artificial Sequence
  Synthetic polypeptide
QGQSGQWYSGGCEAFCGILSSGSSGGSGGSGGLSGRSDNHGGGSQAVVTQESALTTSPGETVTLTCRSSTGAVTTSNYANWVQEKPDHLFTGLIGGTNKRAPGVPARFSGSLIGDKAALTITGAQTEDEAIYFCALWYSNLWVFGGGTKLTVLGGGGSGGGGSGGGGSEVQLVESGGGLVQPKGSLKLSCAASGFTFNTYAMNWVRQAPGKGLEWVARIRSKYNNYATYYADSVKDRFTISRDDSQSILYLQMNNLKTEDTAMYYCVRHGNFGNSYVSWFAYWGQGTLVTVSAGGSLDPKSSDKTHTCPPCPAPELLGGPSVFLFPPKPKDTLMISRTPEVTCVVVDVSHEDPEVKFNWYVDGVEVHNAKTKPREEQYNSTYRVVSVLTVLHQDWLNGKEYKCKVSNKALPAPIEKTISKAKGQPREPQVYTLPPSREEMTKNQVSLTCLVKGFYPSDIAVEWESNGQPENNYKTTPPVLDSDGSFFLYSKLTVDKSRWQQGNVFSCSVMHEALHNHYTQKSLSLSPGK

SEQ ID NO: 17 - DNA, 879 bp, Artificial Sequence
  Synthetic polynucleotide
caaggccagtctggccaagtttattattgcggtgggaatgagagtctgtgcggtgagaggaggggctcgagcggtggcagcggtggctctggtggtctgagcggccgttccgataatcatggcggcggttctcaggctgtcgtgacacaggaaagcgccctgaccaccagccctggcgagacagtgaccctgacctgcagatctagcacaggcgccgtgaccacaagcaactacgccaactgggtgcaggaaaagcccgaccacctgttcaccggcctgatcggcggcaccaacaaaagggctccaggcgtgccagccagattcagcggcagcctgattggcgataaggccgccctgacaatcactggcgcccagaccgaggacgaggccatctacttttgcgccctgtggtacagcaacctgtgggtgttcggcggaggcaccaagctgacagtgctgggaggcggaggatctggcggaggcggaagtggcggagggggatctgaagtgcagctggtggaatctggcggcggactggtgcagcctaagggctctctgaagctgagctgtgccgccagcggcttcaccttcaacacctacgccatgaattgggtgcgccaggcccctggcaagggactggaatgggtggcccggatcagaagcaagtacaacaattacgccacctactacgccgacagcgtgaaggaccggttcaccatcagccgggacgacagccagagcatcctgtatctgcagatgaacaacctgaaaaccgaggacaccgccatgtactactgcgtgcggcacggcaacttcggcaacagctatgtgtcttggtttgcctactggggccagggcaccctcgtgacagtgtctgct

SEQ ID NO: 18 - protein, 293 aa, Artificial Sequence
  Synthetic polypeptide
QGQSGQVYYCGGNESLCGERRGSSGGSGGSGGLSGRSDNHGGGSQAVVTQESALTTSPGETVTLTCRSSTGAVTTSNYANWVQEKPDHLFTGLIGGTNKRAPGVPARFSGSLIGDKAALTITGAQTEDEAIYFCALWYSNLWVFGGGTKLTVLGGGGSGGGGSGGGGSEVQLVESGGGLVQPKGSLKLSCAASGFTFNTYAMNWVRQAPGKGLEWVARIRSKYNNYATYYADSVKDRFTISRDDSQSILYLQMNNLKTEDTAMYYCVRHGNFGNSYVSWFAYWGQGTLVTVSA

SEQ ID NO: 19 - DNA, 1587 bp, Artificial Sequence
  Synthetic polynucleotide
caaggccagtctggccaagtttattattgcggtgggaatgagagtctgtgcggtgagaggaggggctcgagcggtggcagcggtggctctggtggtctgagcggccgttccgataatcatggcggcggttctcaggctgtcgtgacacaggaaagcgccctgaccaccagccctggcgagacagtgaccctgacctgcagatctagcacaggcgccgtgaccacaagcaactacgccaactgggtgcaggaaaagcccgaccacctgttcaccggcctgatcggcggcaccaacaaaagggctccaggcgtgccagccagattcagcggcagcctgattggcgataaggccgccctgacaatcactggcgcccagaccgaggacgaggccatctacttttgcgccctgtggtacagcaacctgtgggtgttcggcggaggcaccaagctgacagtgctgggaggcggaggatctggcggaggcggaagtggcggagggggatctgaagtgcagctggtggaatctggcggcggactggtgcagcctaagggctctctgaagctgagctgtgccgccagcggcttcaccttcaacacctacgccatgaattgggtgcgccaggcccctggcaagggactggaatgggtggcccggatcagaagcaagtacaacaattacgccacctactacgccgacagcgtgaaggaccggttcaccatcagccgggacgacagccagagcatcctgtatctgcagatgaacaacctgaaaaccgaggacaccgccatgtactactgcgtgcggcacggcaacttcggcaacagctatgtgtcttggtttgcctactggggccagggcaccctcgtgacagtgtctgctggcggctccctggaccctaagtcatctgacaaaactcacacatgcccaccgtgcccagcacctgaactcctggggggaccgtcagtcttcctcttccccccaaaacccaaggacaccctcatgatctcccggacccctgaggtcacatgcgtggtggtggacgtgagccacgaagaccctgaggtcaagttcaactggtacgtggacggcgtggaggtgcataatgccaagacaaagccgcgggaggagcagtacaacagcacgtaccgtgtggtcagcgtcctcaccgtcctgcaccaggactggctgaatggcaaggagtacaagtgcaaggtctccaacaaagccctcccagcccccatcgagaaaaccatctccaaagccaaagggcagccccgagaaccacaggtgtacaccctgcccccatcccgggaggagatgaccaagaaccaggtcagcctgacctgcctggtcaaaggcttctatcccagcgacatcgccgtggagtgggagagcaatgggcagccggagaacaactacaagaccacgcctcccgtgctggactccgacggctccttcttcctctacagcaagctcaccgtggacaagagcaggtggcagcaggggaacgtcttctcatgctccgtgatgcatgaggctctgcacaaccactacacgcagaagagcctctccctgtctccgggtaaa

SEQ ID NO: 20 - protein, 529 aa, Artificial Sequence
  Synthetic polypeptide
QGQSGQVYYCGGNESLCGERRGSSGGSGGSGGLSGRSDNHGGGSQAVVTQESALTTSPGETVTLTCRSSTGAVTTSNYANWVQEKPDHLFTGLIGGTNKRAPGVPARFSGSLIGDKAALTITGAQTEDEAIYFCALWYSNLWVFGGGTKLTVLGGGGSGGGGSGGGGSEVQLVESGGGLVQPKGSLKLSCAASGFTFNTYAMNWVRQAPGKGLEWVARIRSKYNNYATYYADSVKDRFTISRDDSQSILYLQMNNLKTEDTAMYYCVRHGNFGNSYVSWFAYWGQGTLVTVSAGGSLDPKSSDKTHTCPPCPAPELLGGPSVFLFPPKPKDTLMISRTPEVTCVVVDVSHEDPEVKFNWYVDGVEVHNAKTKPREEQYNSTYRVVSVLTVLHQDWLNGKEYKCKVSNKALPAPIEKTISKAKGQPREPQVYTLPPSREEMTKNQVSLTCLVKGFYPSDIAVEWESNGQPENNYKTTPPVLDSDGSFFLYSKLTVDKSRWQQGNVFSCSVMHEALHNHYTQKSLSLSPGK

SEQ ID NO: 21 - DNA, 879 bp, Artificial Sequence
  Synthetic polynucleotide
caaggccagtctggccaatttatgtgccagcagcggatgtgggggaatgagttttgccatcagggctcgagcggtggcagcggtggctctggtggtctgagcggccgttccgataatcatggcggcggttctcaggctgtcgtgacacaggaaagcgccctgaccaccagccctggcgagacagtgaccctgacctgcagatctagcacaggcgccgtgaccacaagcaactacgccaactgggtgcaggaaaagcccgaccacctgttcaccggcctgatcggcggcaccaacaaaagggctccaggcgtgccagccagattcagcggcagcctgattggcgataaggccgccctgacaatcactggcgcccagaccgaggacgaggccatctacttttgcgccctgtggtacagcaacctgtgggtgttcggcggaggcaccaagctgacagtgctgggaggcggaggatctggcggaggcggaagtggcggagggggatctgaagtgcagctggtggaatctggcggcggactggtgcagcctaagggctctctgaagctgagctgtgccgccagcggcttcaccttcaacacctacgccatgaattgggtgcgccaggcccctggcaagggactggaatgggtggcccggatcagaagcaagtacaacaattacgccacctactacgccgacagcgtgaaggaccggttcaccatcagccgggacgacagccagagcatcctgtatctgcagatgaacaacctgaaaaccgaggacaccgccatgtactactgcgtgcggcacggcaacttcggcaacagctatgtgtcttggtttgcctactggggccagggcaccctcgtgacagtgtctgct

SEQ ID NO: 22 - protein, 293 aa, Artificial Sequence
  Synthetic polypeptide
QGQSGQFMCQQRMWGNEFCHQGSSGGSGGSGGLSGRSDNHGGGSQAVVTQESALTTSPGETVTLTCRSSTGAVTTSNYANWVQEKPDHLFTGLIGGTNKRAPGVPARFSGSLIGDKAALTITGAQTEDEAIYFCALWYSNLWVFGGGTKLTVLGGGGSGGGGSGGGGSEVQLVESGGGLVQPKGSLKLSCAASGFTFNTYAMNWVRQAPGKGLEWVARIRSKYNNYATYYADSVKDRFTISRDDSQSILYLQMNNLKTEDTAMYYCVRHGNFGNSYVSWFAYWGQGTLVTVSA

SEQ ID NO: 23 - DNA, 1587 bp, Artificial Sequence
  Synthetic polynucleotide
caaggccagtctggccaatttatgtgccagcagcggatgtgggggaatgagttttgccatcagggctcgagcggtggcagcggtggctctggtggtctgagcggccgttccgataatcatggcggcggttctcaggctgtcgtgacacaggaaagcgccctgaccaccagccctggcgagacagtgaccctgacctgcagatctagcacaggcgccgtgaccacaagcaactacgccaactgggtgcaggaaaagcccgaccacctgttcaccggcctgatcggcggcaccaacaaaagggctccaggcgtgccagccagattcagcggcagcctgattggcgataaggccgccctgacaatcactggcgcccagaccgaggacgaggccatctacttttgcgccctgtggtacagcaacctgtgggtgttcggcggaggcaccaagctgacagtgctgggaggcggaggatctggcggaggcggaagtggcggagggggatctgaagtgcagctggtggaatctggcggcggactggtgcagcctaagggctctctgaagctgagctgtgccgccagcggcttcaccttcaacacctacgccatgaattgggtgcgccaggcccctggcaagggactggaatgggtggcccggatcagaagcaagtacaacaattacgccacctactacgccgacagcgtgaaggaccggttcaccatcagccgggacgacagccagagcatcctgtatctgcagatgaacaacctgaaaaccgaggacaccgccatgtactactgcgtgcggcacggcaacttcggcaacagctatgtgtcttggtttgcctactggggccagggcaccctcgtgacagtgtctgctggcggctccctggaccctaagtcatctgacaaaactcacacatgcccaccgtgcccagcacctgaactcctggggggaccgtcagtcttcctcttccccccaaaacccaaggacaccctcatgatctcccggacccctgaggtcacatgcgtggtggtggacgtgagccacgaagaccctgaggtcaagttcaactggtacgtggacggcgtggaggtgcataatgccaagacaaagccgcgggaggagcagtacaacagcacgtaccgtgtggtcagcgtcctcaccgtcctgcaccaggactggctgaatggcaaggagtacaagtgcaaggtctccaacaaagccctcccagcccccatcgagaaaaccatctccaaagccaaagggcagccccgagaaccacaggtgtacaccctgcccccatcccgggaggagatgaccaagaaccaggtcagcctgacctgcctggtcaaaggcttctatcccagcgacatcgccgtggagtgggagagcaatgggcagccggagaacaactacaagaccacgcctcccgtgctggactccgacggctccttcttcctctacagcaagctcaccgtggacaagagcaggtggcagcaggggaacgtcttctcatgctccgtgatgcatgaggctctgcacaaccactacacgcagaagagcctctccctgtctccgggtaaa

SEQ ID NO: 24 - protein, 529 aa, Artificial Sequence
  Synthetic polypeptide
QGQSGQFMCQQRMWGNEFCHQGSSGGSGGSGGLSGRSDNHGGGSQAVVTQESALTTSPGETVTLTCRSSTGAVTTSNYANWVQEKPDHLFTGLIGGTNKRAPGVPARFSGSLIGDKAALTITGAQTEDEAIYFCALWYSNLWVFGGGTKLTVLGGGGSGGGGSGGGGSEVQLVESGGGLVQPKGSLKLSCAASGFTFNTYAMNWVRQAPGKGLEWVARIRSKYNNYATYYADSVKDRFTISRDDSQSILYLQMNNLKTEDTAMYYCVRHGNFGNSYVSWFAYWGQGTLVTVSAGGSLDPKSSDKTHTCPPCPAPELLGGPSVFLFPPKPKDTLMISRTPEVTCVVVDVSHEDPEVKFNWYVDGVEVHNAKTKPREEQYNSTYRVVSVLTVLHQDWLNGKEYKCKVSNKALPAPIEKTISKAKGQPREPQVYTLPPSREEMTKNQVSLTCLVKGFYPSDIAVEWESNGQPENNYKTTPPVLDSDGSFFLYSKLTVDKSRWQQGNVFSCSVMHEALHNHYTQKSLSLSPGK

SEQ ID NO: 25 - DNA, 879 bp, Artificial Sequence
  Synthetic polynucleotide
caaggccagtctggccaaatgatgtattgcggtgggaatgaggtgttgtgcgggccgcgggttggctcgagcggtggcagcggtggctctggtggtctgagcggccgttccgataatcatggcggcggttctcaggctgtcgtgacacaggaaagcgccctgaccaccagccctggcgagacagtgaccctgacctgcagatctagcacaggcgccgtgaccacaagcaactacgccaactgggtgcaggaaaagcccgaccacctgttcaccggcctgatcggcggcaccaacaaaagggctccaggcgtgccagccagattcagcggcagcctgattggcgataaggccgccctgacaatcactggcgcccagaccgaggacgaggccatctacttttgcgccctgtggtacagcaacctgtgggtgttcggcggaggcaccaagctgacagtgctgggaggcggaggatctggcggaggcggaagtggcggagggggatctgaagtgcagctggtggaatctggcggcggactggtgcagcctaagggctctctgaagctgagctgtgccgccagcggcttcaccttcaacacctacgccatgaattgggtgcgccaggcccctggcaagggactggaatgggtggcccggatcagaagcaagtacaacaattacgccacctactacgccgacagcgtgaaggaccggttcaccatcagccgggacgacagccagagcatcctgtatctgcagatgaacaacctgaaaaccgaggacaccgccatgtactactgcgtgcggcacggcaacttcggcaacagctatgtgtcttggtttgcctactggggccagggcaccctcgtgacagtgtctgct

SEQ ID NO: 26 - protein, 293 aa, Artificial Sequence
  Synthetic polypeptide
QGQSGQMMYCGGNEVLCGPRVGSSGGSGGSGGLSGRSDNHGGGSQAVVTQESALTTSPGETVTLTCRSSTGAVTTSNYANWVQEKPDHLFTGLIGGTNKRAPGVPARFSGSLIGDKAALTITGAQTEDEAIYFCALWYSNLWVFGGGTKLTVLGGGGSGGGGSGGGGSEVQLVESGGGLVQPKGSLKLSCAASGFTFNTYAMNWVRQAPGKGLEWVARIRSKYNNYATYYADSVKDRFTISRDDSQSILYLQMNNLKTEDTAMYYCVRHGNFGNSYVSWFAYWGQGTLVTVSA

SEQ ID NO: 27 - DNA, 1587 bp, Artificial Sequence
  Synthetic polynucleotide
caaggccagtctggccaaatgatgtattgcggtgggaatgaggtgttgtgcgggccgcgggttggctcgagcggtggcagcggtggctctggtggtctgagcggccgttccgataatcatggcggcggttctcaggctgtcgtgacacaggaaagcgccctgaccaccagccctggcgagacagtgaccctgacctgcagatctagcacaggcgccgtgaccacaagcaactacgccaactgggtgcaggaaaagcccgaccacctgttcaccggcctgatcggcggcaccaacaaaagggctccaggcgtgccagccagattcagcggcagcctgattggcgataaggccgccctgacaatcactggcgcccagaccgaggacgaggccatctacttttgcgccctgtggtacagcaacctgtgggtgttcggcggaggcaccaagctgacagtgctgggaggcggaggatctggcggaggcggaagtggcggagggggatctgaagtgcagctggtggaatctggcggcggactggtgcagcctaagggctctctgaagctgagctgtgccgccagcggcttcaccttcaacacctacgccatgaattgggtgcgccaggcccctggcaagggactggaatgggtggcccggatcagaagcaagtacaacaattacgccacctactacgccgacagcgtgaaggaccggttcaccatcagccgggacgacagccagagcatcctgtatctgcagatgaacaacctgaaaaccgaggacaccgccatgtactactgcgtgcggcacggcaacttcggcaacagctatgtgtcttggtttgcctactggggccagggcaccctcgtgacagtgtctgctggcggctccctggaccctaagtcatctgacaaaactcacacatgcccaccgtgcccagcacctgaactcctggggggaccgtcagtcttcctcttccccccaaaacccaaggacaccctcatgatctcccggacccctgaggtcacatgcgtggtggtggacgtgagccacgaagaccctgaggtcaagttcaactggtacgtggacggcgtggaggtgcataatgccaagacaaagccgcgggaggagcagtacaacagcacgtaccgtgtggtcagcgtcctcaccgtcctgcaccaggactggctgaatggcaaggagtacaagtgcaaggtctccaacaaagccctcccagcccccatcgagaaaaccatctccaaagccaaagggcagccccgagaaccacaggtgtacaccctgcccccatcccgggaggagatgaccaagaaccaggtcagcctgacctgcctggtcaaaggcttctatcccagcgacatcgccgtggagtgggagagcaatgggcagccggagaacaactacaagaccacgcctcccgtgctggactccgacggctccttcttcctctacagcaagctcaccgtggacaagagcaggtggcagcaggggaacgtcttctcatgctccgtgatgcatgaggctctgcacaaccactacacgcagaagagcctctccctgtctccgggtaaa

SEQ ID NO: 28 - protein, 529 aa, Artificial Sequence
  Synthetic polypeptide
QGQSGQMMYCGGNEVLCGPRVGSSGGSGGSGGLSGRSDNHGGGSQAVVTQESALTTSPGETVTLTCRSSTGAVTTSNYANWVQEKPDHLFTGLIGGTNKRAPGVPARFSGSLIGDKAALTITGAQTEDEAIYFCALWYSNLWVFGGGTKLTVLGGGGSGGGGSGGGGSEVQLVESGGGLVQPKGSLKLSCAASGFTFNTYAMNWVRQAPGKGLEWVARIRSKYNNYATYYADSVKDRFTISRDDSQSILYLQMNNLKTEDTAMYYCVRHGNFGNSYVSWFAYWGQGTLVTVSAGGSLDPKSSDKTHTCPPCPAPELLGGPSVFLFPPKPKDTLMISRTPEVTCVVVDVSHEDPEVKFNWYVDGVEVHNAKTKPREEQYNSTYRVVSVLTVLHQDWLNGKEYKCKVSNKALPAPIEKTISKAKGQPREPQVYTLPPSREEMTKNQVSLTCLVKGFYPSDIAVEWESNGQPENNYKTTPPVLDSDGSFFLYSKLTVDKSRWQQGNVFSCSVMHEALHNHYTQKSLSLSPGK

SEQ ID NO: 29 - DNA, 747 bp, Artificial Sequence
  Synthetic polynucleotide
gaagtgcagctggtggaatctgggggcggactggtgcagcctaagggcagcctgaagctgagctgtgccgccagcggcttcaccttcaacacctacgccatgaactgggtgcgccaggcccctggcaaaggcctggaatgggtggcccggatcagaagcaagtacaacaattacgccacctactacgccgacagcgtgaaggacagattcaccatcagccgggacgacagccagagcatcctgtacctgcagatgaacaacctgaaaaccgaggacaccgccatgtactactgcgtgcggcacggcaacttcggcaacagctatgtgtcttggtttgcctactggggccagggcaccctcgtgacagtgtctgccggtggtggtggtagtggtggcggtggttcaggcggtggcggtagccaggctgtcgtgacacaggaaagcgccctgaccaccagccctggcgagacagtgaccctgacctgtagaagcagcacaggcgccgtgaccacaagcaactacgccaattgggtgcaggaaaagcccgaccacctgttcaccggcctgatcggcggcaccaacaaaagggctccaggcgtgccagccagattcagcggctccctgatcggagataaggccgccctgacaatcactggcgcccagaccgaggacgaggccatctacttttgcgccctgtggtacagcaacctgtgggtgttcggcggaggcaccaagctgaccgtgctg

SEQ ID NO: 30 - protein, 249 aa, Artificial Sequence
  Synthetic polypeptide
EVQLVESGGGLVQPKGSLKLSCAASGFTFNTYAMNWVRQAPGKGLEWVARIRSKYNNYATYYADSVKDRFTISRDDSQSILYLQMNNLKTEDTAMYYCVRHGNFGNSYVSWFAYWGQGTLVTVSAGGGGSGGGGSGGGGSQAVVTQESALTTSPGETVTLTCRSSTGAVTTSNYANWVQEKPDHLFTGLIGGTNKRAPGVPARFSGSLIGDKAALTITGAQTEDEAIYFCALWYSNLWVFGGGTKLTVL

SEQ ID NO: 31 - DNA, 1455 bp, Artificial Sequence
  Synthetic polynucleotide
gaagtgcagctggtggaatctgggggcggactggtgcagcctaagggcagcctgaagctgagctgtgccgccagcggcttcaccttcaacacctacgccatgaactgggtgcgccaggcccctggcaaaggcctggaatgggtggcccggatcagaagcaagtacaacaattacgccacctactacgccgacagcgtgaaggacagattcaccatcagccgggacgacagccagagcatcctgtacctgcagatgaacaacctgaaaaccgaggacaccgccatgtactactgcgtgcggcacggcaacttcggcaacagctatgtgtcttggtttgcctactggggccagggcaccctcgtgacagtgtctgccggtggtggtggtagtggtggcggtggttcaggcggtggcggtagccaggctgtcgtgacacaggaaagcgccctgaccaccagccctggcgagacagtgaccctgacctgtagaagcagcacaggcgccgtgaccacaagcaactacgccaattgggtgcaggaaaagcccgaccacctgttcaccggcctgatcggcggcaccaacaaaagggctccaggcgtgccagccagattcagcggctccctgatcggagataaggccgccctgacaatcactggcgcccagaccgaggacgaggccatctacttttgcgccctgtggtacagcaacctgtgggtgttcggcggaggcaccaagctgaccgtgctgggcggctccctggaccctaagtcatctgacaaaactcacacatgcccaccgtgcccagcacctgaactcctggggggaccgtcagtcttcctcttccccccaaaacccaaggacaccctcatgatctcccggacccctgaggtcacatgcgtggtggtggacgtgagccacgaagaccctgaggtcaagttcaactggtacgtggacggcgtggaggtgcataatgccaagacaaagccgcgggaggagcagtacaacagcacgtaccgtgtggtcagcgtcctcaccgtcctgcaccaggactggctgaatggcaaggagtacaagtgcaaggtctccaacaaagccctcccagcccccatcgagaaaaccatctccaaagccaaagggcagccccgagaaccacaggtgtacaccctgcccccatcccgggaggagatgaccaagaaccaggtcagcctgacctgcctggtcaaaggcttctatcccagcgacatcgccgtggagtgggagagcaatgggcagccggagaacaactacaagaccacgcctcccgtgctggactccgacggctccttcttcctctacagcaagctcaccgtggacaagagcaggtggcagcaggggaacgtcttctcatgctccgtgatgcatgaggctctgcacaaccactacacgcagaagagcctctccctgtctccgggtaaa

SEQ ID NO: 32 - protein, 485 aa, Artificial Sequence
  Synthetic polypeptide
EVQLVESGGGLVQPKGSLKLSCAASGFTFNTYAMNWVRQAPGKGLEWVARIRSKYNNYATYYADSVKDRFTISRDDSQSILYLQMNNLKTEDTAMYYCVRHGNFGNSYVSWFAYWGQGTLVTVSAGGGGSGGGGSGGGGSQAVVTQESALTTSPGETVTLTCRSSTGAVTTSNYANWVQEKPDHLFTGLIGGTNKRAPGVPARFSGSLIGDKAALTITGAQTEDEAIYFCALWYSNLWVFGGGTKLTVLGGSLDPKSSDKTHTCPPCPAPELLGGPSVFLFPPKPKDTLMISRTPEVTCVVVDVSHEDPEVKFNWYVDGVEVHNAKTKPREEQYNSTYRVVSVLTVLHQDWLNGKEYKCKVSNKALPAPIEKTISKAKGQPREPQVYTLPPSREEMTKNQVSLTCLVKGFYPSDIAVEWESNGQPENNYKTTPPVLDSDGSFFLYSKLTVDKSRWQQGNVFSCSVMHEALHNHYTQKSLSLSPGK

SEQ ID NO: 33 - DNA, 879 bp, Artificial Sequence
  Synthetic polynucleotide
caaggccagtctggccaaggttatcggtggggttgcgagtggaattgcggtgggattactactggctcgagcggtggcagcggtggctctggtggtctgagcggccgttccgataatcatggcggcggttctgaagtgcagctggtggaatctgggggcggactggtgcagcctaagggcagcctgaagctgagctgtgccgccagcggcttcaccttcaacacctacgccatgaactgggtgcgccaggcccctggcaaaggcctggaatgggtggcccggatcagaagcaagtacaacaattacgccacctactacgccgacagcgtgaaggacagattcaccatcagccgggacgacagccagagcatcctgtacctgcagatgaacaacctgaaaaccgaggacaccgccatgtactactgcgtgcggcacggcaacttcggcaacagctatgtgtcttggtttgcctactggggccagggcaccctcgtgacagtgtctgccggtggtggtggtagtggtggcggtggttcaggcggtggcggtagccaggctgtcgtgacacaggaaagcgccctgaccaccagccctggcgagacagtgaccctgacctgtagaagcagcacaggcgccgtgaccacaagcaactacgccaattgggtgcaggaaaagcccgaccacctgttcaccggcctgatcggcggcaccaacaaaagggctccaggcgtgccagccagattcagcggctccctgatcggagataaggccgccctgacaatcactggcgcccagaccgaggacgaggccatctacttttgcgccctgtggtacagcaacctgtgggtgttcggcggaggcaccaagctgaccgtgctg

SEQ ID NO: 34 - protein, 293 aa, Artificial Sequence
  Synthetic polypeptide
QGQSGQGYRWGCEWNCGGITTGSSGGSGGSGGLSGRSDNHGGGSEVQLVESGGGLVQPKGSLKLSCAASGFTFNTYAMNWVRQAPGKGLEWVARIRSKYNNYATYYADSVKDRFTISRDDSQSILYLQMNNLKTEDTAMYYCVRHGNFGNSYVSWFAYWGQGTLVTVSAGGGGSGGGGSGGGGSQAVVTQESALTTSPGETVTLTCRSSTGAVTTSNYANWVQEKPDHLFTGLIGGTNKRAPGVPARFSGSLIGDKAALTITGAQTEDEAIYFCALWYSNLWVFGGGTKLTVL

SEQ ID NO: 35 - DNA, 1587 bp, Artificial Sequence
  Synthetic polynucleotide
caaggccagtctggccaaggttatcggtggggttgcgagtggaattgcggtgggattactactggctcgagcggtggcagcggtggctctggtggtctgagcggccgttccgataatcatggcggcggttctgaagtgcagctggtggaatctgggggcggactggtgcagcctaagggcagcctgaagctgagctgtgccgccagcggcttcaccttcaacacctacgccatgaactgggtgcgccaggcccctggcaaaggcctggaatgggtggcccggatcagaagcaagtacaacaattacgccacctactacgccgacagcgtgaaggacagattcaccatcagccgggacgacagccagagcatcctgtacctgcagatgaacaacctgaaaaccgaggacaccgccatgtactactgcgtgcggcacggcaacttcggcaacagctatgtgtcttggtttgcctactggggccagggcaccctcgtgacagtgtctgccggtggtggtggtagtggtggcggtggttcaggcggtggcggtagccaggctgtcgtgacacaggaaagcgccctgaccaccagccctggcgagacagtgaccctgacctgtagaagcagcacaggcgccgtgaccacaagcaactacgccaattgggtgcaggaaaagcccgaccacctgttcaccggcctgatcggcggcaccaacaaaagggctccaggcgtgccagccagattcagcggctccctgatcggagataaggccgccctgacaatcactggcgcccagaccgaggacgaggccatctacttttgcgccctgtggtacagcaacctgtgggtgttcggcggaggcaccaagctgaccgtgctgggcggctccctggaccctaagtcatctgacaaaactcacacatgcccaccgtgcccagcacctgaactcctggggggaccgtcagtcttcctcttccccccaaaacccaaggacaccctcatgatctcccggacccctgaggtcacatgcgtggtggtggacgtgagccacgaagaccctgaggtcaagttcaactggtacgtggacggcgtggaggtgcataatgccaagacaaagccgcgggaggagcagtacaacagcacgtaccgtgtggtcagcgtcctcaccgtcctgcaccaggactggctgaatggcaaggagtacaagtgcaaggtctccaacaaagccctcccagcccccatcgagaaaaccatctccaaagccaaagggcagccccgagaaccacaggtgtacaccctgcccccatcccgggaggagatgaccaagaaccaggtcagcctgacctgcctggtcaaaggcttctatcccagcgacatcgccgtggagtgggagagcaatgggcagccggagaacaactacaagaccacgcctcccgtgctggactccgacggctccttcttcctctacagcaagctcaccgtggacaagagcaggtggcagcaggggaacgtcttctcatgctccgtgatgcatgaggctctgcacaaccactacacgcagaagagcctctccctgtctccgggtaaa

SEQ ID NO: 36 - protein, 529 aa, Artificial Sequence
  Synthetic polypeptide
QGQSGQGYRWGCEWNCGGITTGSSGGSGGSGGLSGRSDNHGGGSEVQLVESGGGLVQPKGSLKLSCAASGFTFNTYAMNWVRQAPGKGLEWVARIRSKYNNYATYYADSVKDRFTISRDDSQSILYLQMNNLKTEDTAMYYCVRHGNFGNSYVSWFAYWGQGTLVTVSAGGGGSGGGGSGGGGSQAVVTQESALTTSPGETVTLTCRSSTGAVTTSNYANWVQEKPDHLFTGLIGGTNKRAPGVPARFSGSLIGDKAALTITGAQTEDEAIYFCALWYSNLWVFGGGTKLTVLGGSLDPKSSDKTHTCPPCPAPELLGGPSVFLFPPKPKDTLMISRTPEVTCVVVDVSHEDPEVKFNWYVDGVEVHNAKTKPREEQYNSTYRVVSVLTVLHQDWLNGKEYKCKVSNKALPAPIEKTISKAKGQPREPQVYTLPPSREEMTKNQVSLTCLVKGFYPSDIAVEWESNGQPENNYKTTPPVLDSDGSFFLYSKLTVDKSRWQQGNVFSCSVMHEALHNHYTQKSLSLSPGK

SEQ ID NO: 37 - DNA, 879 bp, Artificial Sequence
  Synthetic polynucleotide
caaggccagtctggccaatggtattcgggtgggtgcgaggctttttgcggtattttgtcgtcgggctcgagcggtggcagcggtggctctggtggtctgagcggccgttccgataatcatggcggcggttctgaagtgcagctggtggaatctgggggcggactggtgcagcctaagggcagcctgaagctgagctgtgccgccagcggcttcaccttcaacacctacgccatgaactgggtgcgccaggcccctggcaaaggcctggaatgggtggcccggatcagaagcaagtacaacaattacgccacctactacgccgacagcgtgaaggacagattcaccatcagccgggacgacagccagagcatcctgtacctgcagatgaacaacctgaaaaccgaggacaccgccatgtactactgcgtgcggcacggcaacttcggcaacagctatgtgtcttggtttgcctactggggccagggcaccctcgtgacagtgtctgccggtggtggtggtagtggtggcggtggttcaggcggtggcggtagccaggctgtcgtgacacaggaaagcgccctgaccaccagccctggcgagacagtgaccctgacctgtagaagcagcacaggcgccgtgaccacaagcaactacgccaattgggtgcaggaaaagcccgaccacctgttcaccggcctgatcggcggcaccaacaaaagggctccaggcgtgccagccagattcagcggctccctgatcggagataaggccgccctgacaatcactggcgcccagaccgaggacgaggccatctacttttgcgccctgtggtacagcaacctgtgggtgttcggcggaggcaccaagctgaccgtgctg

SEQ ID NO: 38 - protein, 293 aa, Artificial Sequence
  Synthetic polypeptide
QGQSGQWYSGGCEAFCGILSSGSSGGSGGSGGLSGRSDNHGGGSEVQLVESGGGLVQPKGSLKLSCAASGFTFNTYAMNWVRQAPGKGLEWVARIRSKYNNYATYYADSVKDRFTISRDDSQSILYLQMNNLKTEDTAMYYCVRHGNFGNSYVSWFAYWGQGTLVTVSAGGGGSGGGGSGGGGSQAVVTQESALTTSPGETVTLTCRSSTGAVTTSNYANWVQEKPDHLFTGLIGGTNKRAPGVPARFSGSLIGDKAALTITGAQTEDEAIYFCALWYSNLWVFGGGTKLTVL

SEQ ID NO: 39 - DNA, 1587 bp, Artificial Sequence
  Synthetic polynucleotide
caaggccagtctggccaatggtattcgggtgggtgcgaggctttttgcggtattttgtcgtcgggctcgagcggtggcagcggtggctctggtggtctgagcggccgttccgataatcatggcggcggttctgaagtgcagctggtggaatctgggggcggactggtgcagcctaagggcagcctgaagctgagctgtgccgccagcggcttcaccttcaacacctacgccatgaactgggtgcgccaggcccctggcaaaggcctggaatgggtggcccggatcagaagcaagtacaacaattacgccacctactacgccgacagcgtgaaggacagattcaccatcagccgggacgacagccagagcatcctgtacctgcagatgaacaacctgaaaaccgaggacaccgccatgtactactgcgtgcggcacggcaacttcggcaacagctatgtgtcttggtttgcctactggggccagggcaccctcgtgacagtgtctgccggtggtggtggtagtggtggcggtggttcaggcggtggcggtagccaggctgtcgtgacacaggaaagcgccctgaccaccagccctggcgagacagtgaccctgacctgtagaagcagcacaggcgccgtgaccacaagcaactacgccaattgggtgcaggaaaagcccgaccacctgttcaccggcctgatcggcggcaccaacaaaagggctccaggcgtgccagccagattcagcggctccctgatcggagataaggccgccctgacaatcactggcgcccagaccgaggacgaggccatctacttttgcgccctgtggtacagcaacctgtgggtgttcggcggaggcaccaagctgaccgtgctgggcggctccctggaccctaagtcatctgacaaaactcacacatgcccaccgtgcccagcacctgaactcctggggggaccgtcagtcttcctcttccccccaaaacccaaggacaccctcatgatctcccggacccctgaggtcacatgcgtggtggtggacgtgagccacgaagaccctgaggtcaagttcaactggtacgtggacggcgtggaggtgcataatgccaagacaaagccgcgggaggagcagtacaacagcacgtaccgtgtggtcagcgtcctcaccgtcctgcaccaggactggctgaatggcaaggagtacaagtgcaaggtctccaacaaagccctcccagcccccatcgagaaaaccatctccaaagccaaagggcagccccgagaaccacaggtgtacaccctgcccccatcccgggaggagatgaccaagaaccaggtcagcctgacctgcctggtcaaaggcttctatcccagcgacatcgccgtggagtgggagagcaatgggcagccggagaacaactacaagaccacgcctcccgtgctggactccgacggctccttcttcctctacagcaagctcaccgtggacaagagcaggtggcagcaggggaacgtcttctcatgctccgtgatgcatgaggctctgcacaaccactacacgcagaagagcctctccctgtctccgggtaaa

SEQ ID NO: 40 - protein, 529 aa, Artificial Sequence
  Synthetic polypeptide
QGQSGQWYSGGCEAFCGILSSGSSGGSGGSGGLSGRSDNHGGGSEVQLVESGGGLVQPKGSLKLSCAASGFTFNTYAMNWVRQAPGKGLEWVARIRSKYNNYATYYADSVKDRFTISRDDSQSILYLQMNNLKTEDTAMYYCVRHGNFGNSYVSWFAYWGQGTLVTVSAGGGGSGGGGSGGGGSQAVVTQESALTTSPGETVTLTCRSSTGAVTTSNYANWVQEKPDHLFTGLIGGTNKRAPGVPARFSGSLIGDKAALTITGAQTEDEAIYFCALWYSNLWVFGGGTKLTVLGGSLDPKSSDKTHTCPPCPAPELLGGPSVFLFPPKPKDTLMISRTPEVTCVVVDVSHEDPEVKFNWYVDGVEVHNAKTKPREEQYNSTYRVVSVLTVLHQDWLNGKEYKCKVSNKALPAPIEKTISKAKGQPREPQVYTLPPSREEMTKNQVSLTCLVKGFYPSDIAVEWESNGQPENNYKTTPPVLDSDGSFFLYSKLTVDKSRWQQGNVFSCSVMHEALHNHYTQKSLSLSPGK

SEQ ID NO: 41 - DNA, 879 bp, Artificial Sequence
  Synthetic polynucleotide
caaggccagtctggccaagtttattattgcggtgggaatgagagtctgtgcggtgagaggaggggctcgagcggtggcagcggtggctctggtggtctgagcggccgttccgataatcatggcggcggttctgaagtgcagctggtggaatctgggggcggactggtgcagcctaagggcagcctgaagctgagctgtgccgccagcggcttcaccttcaacacctacgccatgaactgggtgcgccaggcccctggcaaaggcctggaatgggtggcccggatcagaagcaagtacaacaattacgccacctactacgccgacagcgtgaaggacagattcaccatcagccgggacgacagccagagcatcctgtacctgcagatgaacaacctgaaaaccgaggacaccgccatgtactactgcgtgcggcacggcaacttcggcaacagctatgtgtcttggtttgcctactggggccagggcaccctcgtgacagtgtctgccggtggtggtggtagtggtggcggtggttcaggcggtggcggtagccaggctgtcgtgacacaggaaagcgccctgaccaccagccctggcgagacagtgaccctgacctgtagaagcagcacaggcgccgtgaccacaagcaactacgccaattgggtgcaggaaaagcccgaccacctgttcaccggcctgatcggcggcaccaacaaaagggctccaggcgtgccagccagattcagcggctccctgatcggagataaggccgccctgacaatcactggcgcccagaccgaggacgaggccatctacttttgcgccctgtggtacagcaacctgtgggtgttcggcggaggcaccaagctgaccgtgctg

SEQ ID NO: 42 - protein, 293 aa, Artificial Sequence
  Synthetic polypeptide
QGQSGQVYYCGGNESLCGERRGSSGGSGGSGGLSGRSDNHGGGSEVQLVESGGGLVQPKGSLKLSCAASGFTFNTYAMNWVRQAPGKGLEWVARIRSKYNNYATYYADSVKDRFTISRDDSQSILYLQMNNLKTEDTAMYYCVRHGNFGNSYVSWFAYWGQGTLVTVSAGGGGSGGGGSGGGGSQAVVTQESALTTSPGETVTLTCRSSTGAVTTSNYANWVQEKPDHLFTGLIGGTNKRAPGVPARFSGSLIGDKAALTITGAQTEDEAIYFCALWYSNLWVFGGGTKLTVL

SEQ ID NO: 43 - DNA, 1587 bp, Artificial Sequence
  Synthetic polynucleotide
caaggccagtctggccaagtttattattgcggtgggaatgagagtctgtgcggtgagaggaggggctcgagcggtggcagcggtggctctggtggtctgagcggccgttccgataatcatggcggcggttctgaagtgcagctggtggaatctgggggcggactggtgcagcctaagggcagcctgaagctgagctgtgccgccagcggcttcaccttcaacacctacgccatgaactgggtgcgccaggcccctggcaaaggcctggaatgggtggcccggatcagaagcaagtacaacaattacgccacctactacgccgacagcgtgaaggacagattcaccatcagccgggacgacagccagagcatcctgtacctgcagatgaacaacctgaaaaccgaggacaccgccatgtactactgcgtgcggcacggcaacttcggcaacagctatgtgtcttggtttgcctactggggccagggcaccctcgtgacagtgtctgccggtggtggtggtagtggtggcggtggttcaggcggtggcggtagccaggctgtcgtgacacaggaaagcgccctgaccaccagccctggcgagacagtgaccctgacctgtagaagcagcacaggcgccgtgaccacaagcaactacgccaattgggtgcaggaaaagcccgaccacctgttcaccggcctgatcggcggcaccaacaaaagggctccaggcgtgccagccagattcagcggctccctgatcggagataaggccgccctgacaatcactggcgcccagaccgaggacgaggccatctacttttgcgccctgtggtacagcaacctgtgggtgttcggcggaggcaccaagctgaccgtgctgggcggctccctggaccctaagtcatctgacaaaactcacacatgcccaccgtgcccagcacctgaactcctggggggaccgtcagtcttcctcttccccccaaaacccaaggacaccctcatgatctcccggacccctgaggtcacatgcgtggtggtggacgtgagccacgaagaccctgaggtcaagttcaactggtacgtggacggcgtggaggtgcataatgccaagacaaagccgcgggaggagcagtacaacagcacgtaccgtgtggtcagcgtcctcaccgtcctgcaccaggactggctgaatggcaaggagtacaagtgcaaggtctccaacaaagccctcccagcccccatcgagaaaaccatctccaaagccaaagggcagccccgagaaccacaggtgtacaccctgcccccatcccgggaggagatgaccaagaaccaggtcagcctgacctgcctggtcaaaggcttctatcccagcgacatcgccgtggagtgggagagcaatgggcagccggagaacaactacaagaccacgcctcccgtgctggactccgacggctccttcttcctctacagcaagctcaccgtggacaagagcaggtggcagcaggggaacgtcttctcatgctccgtgatgcatgaggctctgcacaaccactacacgcagaagagcctctccctgtctccgggtaaa

SEQ ID NO: 44 - protein, 529 aa, Artificial Sequence
  Synthetic polypeptide
QGQSGQVYYCGGNESLCGERRGSSGGSGGSGGLSGRSDNHGGGSEVQLVESGGGLVQPKGSLKLSCAASGFTFNTYAMNWVRQAPGKGLEWVARIRSKYNNYATYYADSVKDRFTISRDDSQSILYLQMNNLKTEDTAMYYCVRHGNFGNSYVSWFAYWGQGTLVTVSAGGGGSGGGGSGGGGSQAVVTQESALTTSPGETVTLTCRSSTGAVTTSNYANWVQEKPDHLFTGLIGGTNKRAPGVPARFSGSLIGDKAALTITGAQTEDEAIYFCALWYSNLWVFGGGTKLTVLGGSLDPKSSDKTHTCPPCPAPELLGGPSVFLFPPKPKDTLMISRTPEVTCVVVDVSHEDPEVKFNWYVDGVEVHNAKTKPREEQYNSTYRVVSVLTVLHQDWLNGKEYKCKVSNKALPAPIEKTISKAKGQPREPQVYTLPPSREEMTKNQVSLTCLVKGFYPSDIAVEWESNGQPENNYKTTPPVLDSDGSFFLYSKLTVDKSRWQQGNVFSCSVMHEALHNHYTQKSLSLSPGK

SEQ ID NO: 45 - DNA, 879 bp, Artificial Sequence
  Synthetic polynucleotide
caaggccagtctggccaatttatgtgccagcagcggatgtgggggaatgagttttgccatcagggctcgagcggtggcagcggtggctctggtggtctgagcggccgttccgataatcatggcggcggttctgaagtgcagctggtggaatctgggggcggactggtgcagcctaagggcagcctgaagctgagctgtgccgccagcggcttcaccttcaacacctacgccatgaactgggtgcgccaggcccctggcaaaggcctggaatgggtggcccggatcagaagcaagtacaacaattacgccacctactacgccgacagcgtgaaggacagattcaccatcagccgggacgacagccagagcatcctgtacctgcagatgaacaacctgaaaaccgaggacaccgccatgtactactgcgtgcggcacggcaacttcggcaacagctatgtgtcttggtttgcctactggggccagggcaccctcgtgacagtgtctgccggtggtggtggtagtggtggcggtggttcaggcggtggcggtagccaggctgtcgtgacacaggaaagcgccctgaccaccagccctggcgagacagtgaccctgacctgtagaagcagcacaggcgccgtgaccacaagcaactacgccaattgggtgcaggaaaagcccgaccacctgttcaccggcctgatcggcggcaccaacaaaagggctccaggcgtgccagccagattcagcggctccctgatcggagataaggccgccctgacaatcactggcgcccagaccgaggacgaggccatctacttttgcgccctgtggtacagcaacctgtgggtgttcggcggaggcaccaagctgaccgtgctg

SEQ ID NO: 46 - protein, 293 aa, Artificial Sequence
  Synthetic polypeptide
QGQSGQFMCQQRMWGNEFCHQGSSGGSGGSGGLSGRSDNHGGGSEVQLVESGGGLVQPKGSLKLSCAASGFTFNTYAMNWVRQAPGKGLEWVARIRSKYNNYATYYADSVKDRFTISRDDSQSILYLQMNNLKTEDTAMYYCVRHGNFGNSYVSWFAYWGQGTLVTVSAGGGGSGGGGSGGGGSQAVVTQESALTTSPGETVTLTCRSSTGAVTTSNYANWVQEKPDHLFTGLIGGTNKRAPGVPARFSGSLIGDKAALTITGAQTEDEAIYFCALWYSNLWVFGGGTKLTVL

SEQ ID NO: 47 - DNA, 1587 bp, Artificial Sequence
  Synthetic polynucleotide
caaggccagtctggccaatttatgtgccagcagcggatgtgggggaatgagttttgccatcagggctcgagcggtggcagcggtggctctggtggtctgagcggccgttccgataatcatggcggcggttctgaagtgcagctggtggaatctgggggcggactggtgcagcctaagggcagcctgaagctgagctgtgccgccagcggcttcaccttcaacacctacgccatgaactgggtgcgccaggcccctggcaaaggcctggaatgggtggcccggatcagaagcaagtacaacaattacgccacctactacgccgacagcgtgaaggacagattcaccatcagccgggacgacagccagagcatcctgtacctgcagatgaacaacctgaaaaccgaggacaccgccatgtactactgcgtgcggcacggcaacttcggcaacagctatgtgtcttggtttgcctactggggccagggcaccctcgtgacagtgtctgccggtggtggtggtagtggtggcggtggttcaggcggtggcggtagccaggctgtcgtgacacaggaaagcgccctgaccaccagccctggcgagacagtgaccctgacctgtagaagcagcacaggcgccgtgaccacaagcaactacgccaattgggtgcaggaaaagcccgaccacctgttcaccggcctgatcggcggcaccaacaaaagggctccaggcgtgccagccagattcagcggctccctgatcggagataaggccgccctgacaatcactggcgcccagaccgaggacgaggccatctacttttgcgccctgtggtacagcaacctgtgggtgttcggcggaggcaccaagctgaccgtgctgggcggctccctggaccctaagtcatctgacaaaactcacacatgcccaccgtgcccagcacctgaactcctggggggaccgtcagtcttcctcttccccccaaaacccaaggacaccctcatgatctcccggacccctgaggtcacatgcgtggtggtggacgtgagccacgaagaccctgaggtcaagttcaactggtacgtggacggcgtggaggtgcataatgccaagacaaagccgcgggaggagcagtacaacagcacgtaccgtgtggtcagcgtcctcaccgtcctgcaccaggactggctgaatggcaaggagtacaagtgcaaggtctccaacaaagccctcccagcccccatcgagaaaaccatctccaaagccaaagggcagccccgagaaccacaggtgtacaccctgcccccatcccgggaggagatgaccaagaaccaggtcagcctgacctgcctggtcaaaggcttctatcccagcgacatcgccgtggagtgggagagcaatgggcagccggagaacaactacaagaccacgcctcccgtgctggactccgacggctccttcttcctctacagcaagctcaccgtggacaagagcaggtggcagcaggggaacgtcttctcatgctccgtgatgcatgaggctctgcacaaccactacacgcagaagagcctctccctgtctccgggtaaa

SEQ ID NO: 48 - protein, 529 aa, Artificial Sequence
  Synthetic polypeptide
QGQSGQFMCQQRMWGNEFCHQGSSGGSGGSGGLSGRSDNHGGGSEVQLVESGGGLVQPKGSLKLSCAASGFTFNTYAMNWVRQAPGKGLEWVARIRSKYNNYATYYADSVKDRFTISRDDSQSILYLQMNNLKTEDTAMYYCVRHGNFGNSYVSWFAYWGQGTLVTVSAGGGGSGGGGSGGGGSQAVVTQESALTTSPGETVTLTCRSSTGAVTTSNYANWVQEKPDHLFTGLIGGTNKRAPGVPARFSGSLIGDKAALTITGAQTEDEAIYFCALWYSNLWVFGGGTKLTVLGGSLDPKSSDKTHTCPPCPAPELLGGPSVFLFPPKPKDTLMISRTPEVTCVVVDVSHEDPEVKFNWYVDGVEVHNAKTKPREEQYNSTYRVVSVLTVLHQDWLNGKEYKCKVSNKALPAPIEKTISKAKGQPREPQVYTLPPSREEMTKNQVSLTCLVKGFYPSDIAVEWESNGQPENNYKTTPPVLDSDGSFFLYSKLTVDKSRWQQGNVFSCSVMHEALHNHYTQKSLSLSPGK

SEQ ID NO: 49 - DNA, 879 bp, Artificial Sequence
  Synthetic polynucleotide
caaggccagtctggccaaatgatgtattgcggtgggaatgaggtgttgtgcgggccgcgggttggctcgagcggtggcagcggtggctctggtggtctgagcggccgttccgataatcatggcggcggttctgaagtgcagctggtggaatctgggggcggactggtgcagcctaagggcagcctgaagctgagctgtgccgccagcggcttcaccttcaacacctacgccatgaactgggtgcgccaggcccctggcaaaggcctggaatgggtggcccggatcagaagcaagtacaacaattacgccacctactacgccgacagcgtgaaggacagattcaccatcagccgggacgacagccagagcatcctgtacctgcagatgaacaacctgaaaaccgaggacaccgccatgtactactgcgtgcggcacggcaacttcggcaacagctatgtgtcttggtttgcctactggggccagggcaccctcgtgacagtgtctgccggtggtggtggtagtggtggcggtggttcaggcggtggcggtagccaggctgtcgtgacacaggaaagcgccctgaccaccagccctggcgagacagtgaccctgacctgtagaagcagcacaggcgccgtgaccacaagcaactacgccaattgggtgcaggaaaagcccgaccacctgttcaccggcctgatcggcggcaccaacaaaagggctccaggcgtgccagccagattcagcggctccctgatcggagataaggccgccctgacaatcactggcgcccagaccgaggacgaggccatctacttttgcgccctgtggtacagcaacctgtgggtgttcggcggaggcaccaagctgaccgtgctg

SEQ ID NO: 50 - protein, 293 aa, Artificial Sequence
  Synthetic polypeptide
QGQSGQMMYCGGNEVLCGPRVGSSGGSGGSGGLSGRSDNHGGGSEVQLVESGGGLVQPKGSLKLSCAASGFTFNTYAMNWVRQAPGKGLEWVARIRSKYNNYATYYADSVKDRFTISRDDSQSILYLQMNNLKTEDTAMYYCVRHGNFGNSYVSWFAYWGQGTLVTVSAGGGGSGGGGSGGGGSQAVVTQESALTTSPGETVTLTCRSSTGAVTTSNYANWVQEKPDHLFTGLIGGTNKRAPGVPARFSGSLIGDKAALTITGAQTEDEAIYFCALWYSNLWVFGGGTKLTVL

SEQ ID NO: 51 - DNA, 1587 bp, Artificial Sequence
  Synthetic polynucleotide
caaggccagtctggccaaatgatgtattgcggtgggaatgaggtgttgtgcgggccgcgggttggctcgagcggtggcagcggtggctctggtggtctgagcggccgttccgataatcatggcggcggttctgaagtgcagctggtggaatctgggggcggactggtgcagcctaagggcagcctgaagctgagctgtgccgccagcggcttcaccttcaacacctacgccatgaactgggtgcgccaggcccctggcaaaggcctggaatgggtggcccggatcagaagcaagtacaacaattacgccacctactacgccgacagcgtgaaggacagattcaccatcagccgggacgacagccagagcatcctgtacctgcagatgaacaacctgaaaaccgaggacaccgccatgtactactgcgtgcggcacggcaacttcggcaacagctatgtgtcttggtttgcctactggggccagggcaccctcgtgacagtgtctgccggtggtggtggtagtggtggcggtggttcaggcggtggcggtagccaggctgtcgtgacacaggaaagcgccctgaccaccagccctggcgagacagtgaccctgacctgtagaagcagcacaggcgccgtgaccacaagcaactacgccaattgggtgcaggaaaagcccgaccacctgttcaccggcctgatcggcggcaccaacaaaagggctccaggcgtgccagccagattcagcggctccctgatcggagataaggccgccctgacaatcactggcgcccagaccgaggacgaggccatctacttttgcgccctgtggtacagcaacctgtgggtgttcggcggaggcaccaagctgaccgtgctgggcggctccctggaccctaagtcatctgacaaaactcacacatgcccaccgtgcccagcacctgaactcctggggggaccgtcagtcttcctcttccccccaaaacccaaggacaccctcatgatctcccggacccctgaggtcacatgcgtggtggtggacgtgagccacgaagaccctgaggtcaagttcaactggtacgtggacggcgtggaggtgcataatgccaagacaaagccgcgggaggagcagtacaacagcacgtaccgtgtggtcagcgtcctcaccgtcctgcaccaggactggctgaatggcaaggagtacaagtgcaaggtctccaacaaagccctcccagcccccatcgagaaaaccatctccaaagccaaagggcagccccgagaaccacaggtgtacaccctgcccccatcccgggaggagatgaccaagaaccaggtcagcctgacctgcctggtcaaaggcttctatcccagcgacatcgccgtggagtgggagagcaatgggcagccggagaacaactacaagaccacgcctcccgtgctggactccgacggctccttcttcctctacagcaagctcaccgtggacaagagcaggtggcagcaggggaacgtcttctcatgctccgtgatgcatgaggctctgcacaaccactacacgcagaagagcctctccctgtctccgggtaaa

SEQ ID NO: 52 - protein, 529 aa, Artificial Sequence
  Synthetic polypeptide
QGQSGQMMYCGGNEVLCGPRVGSSGGSGGSGGLSGRSDNHGGGSEVQLVESGGGLVQPKGSLKLSCAASGFTFNTYAMNWVRQAPGKGLEWVARIRSKYNNYATYYADSVKDRFTISRDDSQSILYLQMNNLKTEDTAMYYCVRHGNFGNSYVSWFAYWGQGTLVTVSAGGGGSGGGGSGGGGSQAVVTQESALTTSPGETVTLTCRSSTGAVTTSNYANWVQEKPDHLFTGLIGGTNKRAPGVPARFSGSLIGDKAALTITGAQTEDEAIYFCALWYSNLWVFGGGTKLTVLGGSLDPKSSDKTHTCPPCPAPELLGGPSVFLFPPKPKDTLMISRTPEVTCVVVDVSHEDPEVKFNWYVDGVEVHNAKTKPREEQYNSTYRVVSVLTVLHQDWLNGKEYKCKVSNKALPAPIEKTISKAKGQPREPQVYTLPPSREEMTKNQVSLTCLVKGFYPSDIAVEWESNGQPENNYKTTPPVLDSDGSFFLYSKLTVDKSRWQQGNVFSCSVMHEALHNHYTQKSLSLSPGK

SEQ ID NO: 53 - protein, 5 aa, Artificial Sequence
  Synthetic oligopeptide
TYAMN

SEQ ID NO: 54 - protein, 19 aa, Artificial Sequence
  Synthetic oligopeptide
RIRSKYNNYATYYADSVKD

SEQ ID NO: 55 - protein, 14 aa, Artificial Sequence
  Synthetic oligopeptide
HGNFGNSYVSWFAY

SEQ ID NO: 56 - protein, 14 aa, Artificial Sequence
  Synthetic oligopeptide
RSSTGAVTTSNYAN

SEQ ID NO: 57 - protein, 7 aa, Artificial Sequence
  Synthetic oligopeptide
GTNKRAP

SEQ ID NO: 58 - protein, 9 aa, Artificial Sequence
  Synthetic oligopeptide
ALWYSNLWV

SEQ ID NO: 59 - protein, 5 aa, Artificial Sequence
  Synthetic oligopeptide
GSGGS

SEQ ID NO: 60 - protein, 4 aa, Artificial Sequence
  Synthetic oligopeptide
GGGS

SEQ ID NO: 61 - protein, 4 aa, Artificial Sequence
  Synthetic oligopeptide
GGSG

SEQ ID NO: 62 - protein, 5 aa, Artificial Sequence
  Synthetic oligopeptide
GGSGG

SEQ ID NO: 63 - protein, 5 aa, Artificial Sequence
  Synthetic oligopeptide
GSGSG

SEQ ID NO: 64 - protein, 5 aa, Artificial Sequence
  Synthetic oligopeptide
GSGGG

SEQ ID NO: 65 - protein, 5 aa, Artificial Sequence
  Synthetic oligopeptide
GGGSG

SEQ ID NO: 66 - protein, 5 aa, Artificial Sequence
  Synthetic oligopeptide
GSSSG

SEQ ID NO: 67 - protein, 8 aa, Artificial Sequence
  Synthetic oligopeptide
LSGRSDNH

SEQ ID NO: 68 - protein, 8 aa, Artificial Sequence
  Synthetic oligopeptide
TGRGPSWV

SEQ ID NO: 69 - protein, 8 aa, Artificial Sequence
  Synthetic oligopeptide
SARGPSRW

SEQ ID NO: 70 - protein, 8 aa, Artificial Sequence
  Synthetic oligopeptide
TARGPSFK

SEQ ID NO: 71 - protein, 8 aa, Artificial Sequence
  Synthetic oligopeptide
GGWHTGRN

SEQ ID NO: 72 - protein, 8 aa, Artificial Sequence
  Synthetic oligopeptide
HTGRSGAL

SEQ ID NO: 73 - protein, 8 aa, Artificial Sequence
  Synthetic oligopeptide
PLTGRSGG

SEQ ID NO: 74 - protein, 8 aa, Artificial Sequence
  Synthetic oligopeptide
AARGPAIH

SEQ ID NO: 75 - protein, 8 aa, Artificial Sequence
  Synthetic oligopeptide
RGPAFNPM

SEQ ID NO: 76 - protein, 8 aa, Artificial Sequence
  Synthetic oligopeptide
SSRGPAYL

SEQ ID NO: 77 - protein, 8 aa, Artificial Sequence
  Synthetic oligopeptide
RGPATPIM

SEQ ID NO: 78 - protein, 4 aa, Artificial Sequence
  Synthetic oligopeptide
RGPA

SEQ ID NO: 79 - protein, 10 aa, Artificial Sequence
  Synthetic oligopeptide
GGQPSGMWGW

SEQ ID NO: 80 - protein, 10 aa, Artificial Sequence
  Synthetic oligopeptide
FPRPLGITGL

SEQ ID NO: 81 - protein, 10 aa, Artificial Sequence
  Synthetic oligopeptide
VHMPLGFLGP

SEQ ID NO: 82 - protein, 8 aa, Artificial Sequence
  Synthetic oligopeptide
SPLTGRSG

SEQ ID NO: 83 - protein, 8 aa, Artificial Sequence
  Synthetic oligopeptide
SAGFSLPA

SEQ ID NO: 84 - protein, 9 aa, Artificial Sequence
  Synthetic oligopeptide
LAPLGLQRR

SEQ ID NO: 85 - protein, 8 aa, Artificial Sequence
  Synthetic oligopeptide
SGGPLGVR

SEQ ID NO: 86 - protein, 4 aa, Artificial Sequence
  Synthetic oligopeptide
PLGL

SEQ ID NO: 87 - protein, 6 aa, Artificial Sequence
  Synthetic oligopeptide
QGQSGQ

SEQ ID NO: 88 - protein, 5 aa, Artificial Sequence
  Synthetic oligopeptide
SYAMS

SEQ ID NO: 89 - protein, 17 aa, Artificial Sequence
  Synthetic oligopeptide
SIDPEGRQTYYADSVKG

SEQ ID NO: 90 - protein, 10 aa, Artificial Sequence
  Synthetic oligopeptide
DIGGRSAFDY

SEQ ID NO: 91 - protein, 9 aa, Artificial Sequence
  Synthetic oligopeptide
RASQSISSY

SEQ ID NO: 92 - protein, 7 aa, Artificial Sequence
  Synthetic oligopeptide
AASSLQS

SEQ ID NO: 93 - protein, 9 aa, Artificial Sequence
  Synthetic oligopeptide
QQTVVAPPL

SEQ ID NO: 94 - protein, 5 aa, Artificial Sequence
  Synthetic oligopeptide
NYGVH

SEQ ID NO: 95 - protein, 16 aa, Artificial Sequence
  Synthetic oligopeptide
VIWSGGNTDYNTPFTS

SEQ ID NO: 96 - protein, 11 aa, Artificial Sequence
  Synthetic oligopeptide
ALTYYDYEFAY

SEQ ID NO: 97 - protein, 11 aa, Artificial Sequence
  Synthetic oligopeptide
RASQSIGTNIH

SEQ ID NO: 98 - protein, 8 aa, Artificial Sequence
  Synthetic oligopeptide
KYASESIS

SEQ ID NO: 99 - protein, 9 aa, Artificial Sequence
  Synthetic oligopeptide
QQNNNWPTT

SEQ ID NO: 100 - DNA, 1350 bp, Artificial Sequence
  Synthetic polynucleotide
caggtgcagctgaaacagagcggcccgggcctggtgcagccgagccagagcctgagcattacctgcaccgtgagcggctttagcctgaccaactatggcgtgcattgggtgcgccagagcccgggcaaaggcctggaatggctgggcgtgatttggagcggcggcaacaccgattataacaccccgtttaccagccgcctgagcattaacaaagataacagcaaaagccaggtgttttttaaaatgaacagcctgcaaagccaggataccgcgatttattattgcgcgcgcgcgctgacctattatgattatgaatttgcgtattggggccagggcaccctggtgaccgtgagcgcggctagcaccaagggcccatcggtcttccccctggcaccctcctccaagagcacctctgggggcacagcggccctgggctgcctggtcaaggactacttccccgaaccggtgacggtgtcgtggaactcaggcgccctgaccagcggcgtgcacaccttcccggctgtcctacagtcctcaggactctactccctcagcagcgtggtgaccgtgccctccagcagcttgggcacccagacctacatctgcaacgtgaatcacaagcccagcaacaccaaggtggacaagaaagttgagcccaaatcttgtgacaaaactcacacatgcccaccgtgcccagcacctgaactcctggggggaccgtcagtcttcctcttccccccaaaacccaaggacaccctcatgatctcccggacccctgaggtcacatgcgtggtggtggacgtgagccacgaagaccctgaggtcaagttcaactggtacgtggacggcgtggaggtgcataatgccaagacaaagccgcgggaggagcagtacaacagcacgtaccgtgtggtcagcgtcctcaccgtcctgcaccaggactggctgaatggcaaggagtacaagtgcaaggtctccaacaaagccctcccagcccccatcgagaaaaccatctccaaagccaaagggcagccccgagaaccacaggtgtacaccctgcccccatcccgggatgaactgaccaagaaccaggtcagcctgacctgcctggtcaaaggcttctatcccagcgacatcgccgtggagtgggagagcaatgggcagccggagaacaactacaagaccacgcctcccgtgctggactccgacggctccttcttcctctacagcaagctcaccgtggacaagagcaggtggcagcaggggaacgtcttctcatgctccgtgatgcatgaggctctgcacaaccactacacgcagaagagcctctccctgtctccgggtaaatga

SEQ ID NO: 101 - protein, 449 aa, Artificial Sequence
  Synthetic polypeptide
QVQLKQSGPGLVQPSQSLSITCTVSGFSLTNYGVHWVRQSPGKGLEWLGVIWSGGNTDYNTPFTSRLSINKDNSKSQVFFKMNSLQSQDTAIYYCARALTYYDYEFAYWGQGTLVTVSAASTKGPSVFPLAPSSKSTSGGTAALGCLVKDYFPEPVTVSWNSGALTSGVHTFPAVLQSSGLYSLSSVVTVPSSSLGTQTYICNVNHKPSNTKVDKKVEPKSCDKTHTCPPCPAPELLGGPSVFLFPPKPKDTLMISRTPEVTCVVVDVSHEDPEVKFNWYVDGVEVHNAKTKPREEQYNSTYRVVSVLTVLHQDWLNGKEYKCKVSNKALPAPIEKTISKAKGQPREPQVYTLPPSRDELTKNQVSLTCLVKGFYPSDIAVEWESNGQPENNYKTTPPVLDSDGSFFLYSKLTVDKSRWQQGNVFSCSVMHEALHNHYTQKSLSLSPGK

SEQ ID NO: 102 - DNA, 645 bp, Artificial Sequence
  Synthetic polynucleotide
cagatcttgctgacccagagcccggtgattctgagcgtgagcccgggcgaacgtgtgagctttagctgccgcgcgagccagagcattggcaccaacattcattggtatcagcagcgcaccaacggcagcccgcgcctgctgattaaatatgcgagcgaaagcattagcggcattccgagccgctttagcggcagcggcagcggcaccgattttaccctgagcattaacagcgtggaaagcgaagatattgcggattattattgccagcagaacaacaactggccgaccacctttggcgcgggcaccaaactggaactgaaacgtacggtggctgcaccatctgtcttcatcttcccgccatctgatgagcagttgaaatctggaactgcctctgttgtgtgcctgctgaataacttctatcccagagaggccaaagtacagtggaaggtggataacgccctccaatcgggtaactcccaggagagtgtcacagagcaggacagcaaggacagcacctacagcctcagcagcaccctgacgctgagcaaagcagactacgagaaacacaaagtctacgcctgcgaagtcacccatcagggcctgagctcgcccgtcacaaagagcttcaacaggggagagtgttag

SEQ ID NO: 103 - protein, 214 aa, Artificial Sequence
  Synthetic polypeptide
QILLTQSPVILSVSPGERVSFSCRASQSIGTNIHWYQQRTNGSPRLLIKYASESISGIPSRFSGSGSGTDFTLSINSVESEDIADYYCQQNNNWPTTFGAGTKLELKRTVAAPSVFIFPPSDEQLKSGTASVVCLLNNFYPREAKVQWKVDNALQSGNSQESVTEQDSKDSTYSLSSTLTLSKADYEKHKVYACEVTHQGLSSPVTKSFNRGEC

SEQ ID NO: 104 - DNA, 1350 bp, Artificial Sequence
  Synthetic polynucleotide
caggtgcagctgaaacagagcggcccgggcctggtgcagccgagccagagcctgagcattacctgcaccgtgagcggctttagcctgaccaactatggcgtgcattgggtgcgccagagcccgggcaaaggcctggaatggctgggcgtgatttggagcggcggcaacaccgattataacaccccgtttaccagccgcctgagcattaacaaagataacagcaaaagccaggtgttttttaaaatgaacagcctgcaaagcaacgataccgcgatttattattgcgcgcgcgcgctgacctattatgattatgaatttgcgtattggggccagggcaccctggtgaccgtgagcgcggctagcaccaagggcccatcggtcttccccctggcaccctcctccaagagcacctctgggggcacagcggccctgggctgcctggtcaaggactacttccccgaaccggtgacggtgtcgtggaactcaggcgccctgaccagcggcgtgcacaccttcccggctgtcctacagtcctcaggactctactccctcagcagcgtggtgaccgtgccctccagcagcttgggcacccagacctacatctgcaacgtgaatcacaagcccagcaacaccaaggtggacaagaaagttgagcccaaatcttgtgacaaaactcacacatgcccaccgtgcccagcacctgaactcctggggggaccgtcagtcttcctcttccccccaaaacccaaggacaccctcatgatctcccggacccctgaggtcacatgcgtggtggtggacgtgagccacgaagaccctgaggtcaagttcaactggtacgtggacggcgtggaggtgcataatgccaagacaaagccgcgggaggagcagtacaacagcacgtaccgtgtggtcagcgtcctcaccgtcctgcaccaggactggctgaatggcaaggagtacaagtgcaaggtctccaacaaagccctcccagcccccatcgagaaaaccatctccaaagccaaagggcagccccgagaaccacaggtgtacaccctgcccccatcccgggatgaactgaccaagaaccaggtcagcctgacctgcctggtcaaaggcttctatcccagcgacatcgccgtggagtgggagagcaatgggcagccggagaacaactacaagaccacgcctcccgtgctggactccgacggctccttcttcctctacagcaagctcaccgtggacaagagcaggtggcagcaggggaacgtcttctcatgctccgtgatgcatgaggctctgcacaaccactacacgcagaagagcctctccctgtctccgggtaaatga

SEQ ID NO: 105 - protein, 449 aa, Artificial Sequence
  Synthetic polypeptide
QVQLKQSGPGLVQPSQSLSITCTVSGFSLTNYGVHWVRQSPGKGLEWLGVIWSGGNTDYNTPFTSRLSINKDNSKSQVFFKMNSLQSNDTAIYYCARALTYYDYEFAYWGQGTLVTVSAASTKGPSVFPLAPSSKSTSGGTAALGCLVKDYFPEPVTVSWNSGALTSGVHTFPAVLQSSGLYSLSSVVTVPSSSLGTQTYICNVNHKPSNTKVDKKVEPKSCDKTHTCPPCPAPELLGGPSVFLFPPKPKDTLMISRTPEVTCVVVDVSHEDPEVKFNWYVDGVEVHNAKTKPREEQYNSTYRVVSVLTVLHQDWLNGKEYKCKVSNKALPAPIEKTISKAKGQPREPQVYTLPPSRDELTKNQVSLTCLVKGFYPSDIAVEWESNGQPENNYKTTPPVLDSDGSFFLYSKLTVDKSRWQQGNVFSCSVMHEALHNHYTQKSLSLSPGK

SEQ ID NO: 106 - DNA, 1350 bp, Artificial Sequence
  Synthetic polynucleotide
caggtgcagctgaaacagagcggcccgggcctggtgcagccgagccagagcctgagcattacctgcaccgtgagcggctttagcctgaccaactatggcgtgcattgggtgcgccagagcccgggcaaaggcctggaatggctgggcgtgatttggagcggcggcaacaccgattataacaccccgtttaccagccgcctgagcattaacaaagataacagcaaaagccaggtgttttttaaaatgaacagcctgcaaagccaggataccgcgatttattattgcgcgcgcgcgctgacctattatgattatgaatttgcgtattggggccagggcaccctggtgaccgtgagcgcggctagcaccaagggcccatcggtcttccccctggcaccctcctccaagagcacctctgggggcacagcggccctgggctgcctggtcaaggactacttccccgaaccggtgacggtgtcgtggaactcaggcgccctgaccagcggcgtgcacaccttcccggctgtcctacagtcctcaggactctactccctcagcagcgtggtgaccgtgccctccagcagcttgggcacccagacctacatctgcaacgtgaatcacaagcccagcaacaccaaggtggacaagaaagttgagcccaaatcttgtgacaaaactcacacatgcccaccgtgcccagcacctgaactcctggggggaccgtcagtcttcctcttccccccaaaacccaaggacaccctcatgatctcccggacccctgaggtcacatgcgtggtggtggacgtgagccacgaagaccctgaggtcaagttcaactggtacgtggacggcgtggaggtgcataatgccaagacaaagccgcgggaggagcagtacgccagcacgtaccgtgtggtcagcgtcctcaccgtcctgcaccaggactggctgaatggcaaggagtacaagtgcaaggtctccaacaaagccctcccagcccccatcgagaaaaccatctccaaagccaaagggcagccccgagaaccacaggtgtacaccctgcccccatcccgggatgaactgaccaagaaccaggtcagcctgacctgcctggtcaaaggcttctatcccagcgacatcgccgtggagtgggagagcaatgggcagccggagaacaactacaagaccacgcctcccgtgctggactccgacggctccttcttcctctacagcaagctcaccgtggacaagagcaggtggcagcaggggaacgtcttctcatgctccgtgatgcatgaggctctgcacaaccactacacgcagaagagcctctccctgtctccgggtaaatga

SEQ ID NO: 107 - protein, 449 aa, Artificial Sequence
  Synthetic polypeptide
QVQLKQSGPGLVQPSQSLSITCTVSGFSLTNYGVHWVRQSPGKGLEWLGVIWSGGNTDYNTPFTSRLSINKDNSKSQVFFKMNSLQSQDTAIYYCARALTYYDYEFAYWGQGTLVTVSAASTKGPSVFPLAPSSKSTSGGTAALGCLVKDYFPEPVTVSWNSGALTSGVHTFPAVLQSSGLYSLSSVVTVPSSSLGTQTYICNVNHKPSNTKVDKKVEPKSCDKTHTCPPCPAPELLGGPSVFLFPPKPKDTLMISRTPEVTCVVVDVSHEDPEVKFNWYVDGVEVHNAKTKPREEQYASTYRVVSVLTVLHQDWLNGKEYKCKVSNKALPAPIEKTISKAKGQPREPQVYTLPPSRDELTKNQVSLTCLVKGFYPSDIAVEWESNGQPENNYKTTPPVLDSDGSFFLYSKLTVDKSRWQQGNVFSCSVMHEALHNHYTQKSLSLSPGK

SEQ ID NO: 108 - protein, 449 aa, Artificial Sequence
  Synthetic polypeptide
QVQLQESGPGLVRPSQTLSLTCTVSGYSITSDHAWSWVRQPPGRGLEWIGYISYSGITTYNPSLKSRVTISRDNSKNTLYLQMNSLRAEDTAVYYCARSLARTTAMDYWGQGSLVTVSSASTKGPSVFPLAPSSKSTSGGTAALGCLVKDYFPEPVTVSWNSGALTSGVHTFPAVLQSSGLYSLSSVVTVPSSSLGTQTYICNVNHKPSNTKVDKKVEPKSCDKTHTCPPCPAPELLGGPSVFLFPPKPKDTLMISRTPEVTCVVVDVSHEDPEVKFNWYVDGVEVHNAKTKPREEQYNSTYRVVSVLTVLHQDWLNGKEYKCKVSNKALPAPIEKTISKAKGQPREPQVYTLPPSREEMTKNQVSLTCLVKGFYPSDIAVEWESNGQPENNYKTTPPVLDSDGSFFLYSKLTVDKSRWQQGNVFSCSVMHEALHNHYTQKSLSLSPGK

SEQ ID NO: 109 - protein, 214 aa, Artificial Sequence [sequence omitted]

SEQ ID NO: 110 - protein, 214 aa, Artificial Sequence
  Synthetic polypeptide
DIQMTQSPSSLSASVGDRVTITCRASQSISSYLNWYQQKPGKAPKLLIYAASSLQSGVPSRFSGSGSGTDFTLTISSLQPEDFATYYCQQTVVAPPLFGQGTKVEIKRTVAAPSVFIFPPSDEQLKSGTASVVCLLNNFYPREAKVQWKVDNALQSGNSQESVTEQDSKDSTYSLSSTLTLSKADYEKHKVYACEVTHQGLSSPVTKSFNRGEC

SEQ ID NO: 111 - protein, 449 aa, Artificial Sequence
  Synthetic polypeptide
EVQLLESGGGLVQPGGSLRLSCAASGFTFSSYAMSWVRQAPGKGLEWVSSIDPEGRQTYYADSVKGRFTISRDNSKNTLYLQMNSLRAEDTAVYYCAKDIGGRSAFDYWGQGTLVTVSSASTKGPSVFPLAPSSKSTSGGTAALGCLVKDYFPEPVTVSWNSGALTSGVHTFPAVLQSSGLYSLSSVVTVPSSSLGTQTYICNVNHKPSNTKVDKKVEPKSCDKTHTCPPCPAPELLGGPSVFLFPPKPKDTLMISRTPEVTCVVVDVSHEDPEVKFNWYVDGVEVHNAKTKPREEQYNSTYRVVSVLTVLHQDWLNGKEYKCKVSNKALPAPIEKTISKAKGQPREPQVYTLPPSREEMTKNQVSLTCLVKGFYPSDIAVEWESNGQPENNYKTTPPVLDSDGSFFLYSKLTVDKSRWQQGNVFSCSVMHEALHNHYTQKSLSLSPGK

SEQ ID NO: 112 - protein, 449 aa, Artificial Sequence
  Synthetic polypeptide
EVHLLESGGGLVQPGGSLRLSCAASGFTFSSYAMSWVRQAPGKGLEWVSSIDPEGRQTYYADSVKGRFTISRDNSKNTLYLQMNSLRAEDTAVYYCAKDIGGRSAFDYWGQGTLVTVSSASTKGPSVFPLAPSSKSTSGGTAALGCLVKDYFPEPVTVSWNSGALTSGVHTFPAVLQSSGLYSLSSVVTVPSSSLGTQTYICNVNHKPSNTKVDKKVEPKSCDKTHTCPPCPAPELLGGPSVFLFPPKPKDTLMISRTPEVTCVVVDVSHEDPEVKFNWYVDGVEVHNAKTKPREEQYNSTYRVVSVLTVLHQDWLNGKEYKCKVSNKALPAPIEKTISKAKGQPREPQVYTLPPSREEMTKNQVSLTCLVKGFYPSDIAVEWESNGQPENNYKTTPPVLDSDGSFFLYSKLTVDKSRWQQGNVFSCSVMHEALHNHYTQKSLSLSPGK

SEQ ID NO: 113 - protein, 214 aa, Artificial Sequence
  Synthetic polypeptide
  misc_feature (182)..(182): Xaa can be any naturally occurring amino acid
DIQMTQSPSSLSASVGDRVTITCRASQSISSYLNWYQQKPGKAPKLLIYAASSLQSGVPSRFSGSGSGTDFTLTISSLQPEDFATYYCQQTVVAPPLFGQGTKVEIKRTVAAPSVFIFPPSDEQLKSGTASVVCLLNNFYPREAKVQWKVDNALQSGNSQESVTEQDSKDSTYSLSSTLTLXKADYEKHKVYACEVTHQGLSSPVTKSFNRGEC

SEQ ID NO: 114 - protein, 108 aa, Artificial Sequence
  Synthetic polypeptide
DIQMTQSPSSLSASVGDRVTITCRASQSISSYLNWYQQKPGKAPKLLIYAASSLQSGVPSRFSGSGSGTDFTLTISSLQPEDFATYYCQQSVVAPLTFGQGTKVEIKR

SEQ ID NO: 115 - protein, 119 aa, Artificial Sequence
  Synthetic polypeptide
EVQLLESGGGLVQPGGSLRLSCAASGFTFSSYAMSWVRQAPGKGLEWVSSIEQMGWQTYYADSVKGRFTISRDNSKNTLYLQMNSLRAEDTAVYYCAKDIGGRSAFDYWGQGTLVTVSS

SEQ ID NO: 116 - protein, 108 aa, Artificial Sequence; identical to SEQ ID NO: 114
  Synthetic polypeptide

SEQ ID NO: 117 - protein, 119 aa, Artificial Sequence
  Synthetic polypeptide
EVQLLESGGGLVQPGGSLRLSCAASGFTFSSYAMSWVRQAPGKGLEWVSSIEQMGWQTYYADSVKGRFTISRDNSKNTLYLQMNSLRAEDTAVYYCAKSPPYHGQFDYWGQGTLVTVSS

SEQ ID NO: 118 - protein, 108 aa, Artificial Sequence; identical to SEQ ID NO: 114
  Synthetic polypeptide

SEQ ID NO: 119 - protein, 119 aa, Artificial Sequence
  Synthetic polypeptide
EVQLLESGGGLVQPGGSLRLSCAASGFTFSSYAMSWVRQAPGKGLEWVSSIEQMGWQTYYADSVKGRFTISRDNSKNTLYLQMNSLRAEDTAVYYCAKSPPFFGQFDYWGQGTLVTVSS

SEQ ID NO: 120 - protein, 108 aa, Artificial Sequence; identical to SEQ ID NO: 114
  Synthetic polypeptide

SEQ ID NO: 121 - protein, 119 aa, Artificial Sequence
  Synthetic polypeptide
EVQLLESGGGLVQPGGSLRLSCAASGFTFSSYAMSWVRQAPGKGLEWVSSIEQMGWQTYYADSVKGRFTISRDNSKNTLYLQMNSLRAEDTAVYYCAKHIGRTNPFDYWGQGTLVTVSS

SEQ ID NO: 122 - protein, 108 aa, Artificial Sequence; identical to SEQ ID NO: 114
  Synthetic polypeptide

SEQ ID NO: 123 - protein, 116 aa, Artificial Sequence
  Synthetic polypeptide
EVQLLESGGGLVQPGGSLRLSCAASGFTFSSYAMSWVRQAPGKGLEWVSSIEQMGWQTEYADSVKGRFTISRDNSKNTLYLQMNSLRAEDTAVYYCAKSAAAFDYWGQGTLVTVSS

SEQ ID NO: 124 - protein, 108 aa, Artificial Sequence; identical to SEQ ID NO: 114
  Synthetic polypeptide

SEQ ID NO: 125 - protein, 119 aa, Artificial Sequence
  Synthetic polypeptide
EVQLLESGGGLVQPGGSLRLSCAASGFTFSSYAMSWVRQAPGKGLEWVSSIEQMGWQTYYADSVKGRFTISRDNSKNTLYLQMNSLRAEDTAVYYCAKSPPYYGQFDYWGQGTLVTVSS

SEQ ID NO: 126 - protein, 108 aa, Artificial Sequence; identical to SEQ ID NO: 114
  Synthetic polypeptide

SEQ ID NO: 127 - protein, 119 aa, Artificial Sequence; identical to SEQ ID NO: 119
  Synthetic polypeptide

SEQ ID NO: 128 - protein, 108 aa, Artificial Sequence; identical to SEQ ID NO: 114
  Synthetic polypeptide

SEQ ID NO: 129 - protein, 119 aa, Artificial Sequence; identical to SEQ ID NO: 115
  Synthetic polypeptide

SEQ ID NO: 130 - protein, 108 aa, Artificial Sequence; identical to SEQ ID NO: 114
  Synthetic polypeptide

SEQ ID NO: 131 - protein, 116 aa, Artificial Sequence
  Synthetic polypeptide
EVQLLESGGGLVQPGGSLRLSCAASGFTFSSYAMSWVRQAPGKGLEWVSSIEEMGWQTLYADSVKGRFTISRDNSKNTLYLQMNSLRAEDTAVYYCAKSAAAFDYWGQGTLVTVSS

SEQ ID NO: 132 - protein, 108 aa, Artificial Sequence; identical to SEQ ID NO: 114
  Synthetic polypeptide

SEQ ID NO: 133 - protein, 119 aa, Artificial Sequence; identical to SEQ ID NO: 115
  Synthetic polypeptide

SEQ ID NO: 134 - protein, 108 aa, Artificial Sequence; identical to SEQ ID NO: 114
  Synthetic polypeptide

SEQ ID NO: 135 - protein, 119 aa, Artificial Sequence
  Synthetic polypeptide
EVQLLESGGGLVQPGGSLRLSCAASGFTFSSYAMSWVRQAPGKGLEWVSSIEQMGWQTYYADSVKGRFTISRDNSKNTLYLQMNSLRAEDTAVYYCAKSPPFYGQFDYWGQGTLVTVSS

SEQ ID NO: 136 - protein, 108 aa, Artificial Sequence; identical to SEQ ID NO: 114
  Synthetic polypeptide

SEQ ID NO: 137 - protein, 119 aa, Artificial Sequence; identical to SEQ ID NO: 119
  Synthetic polypeptide

SEQ ID NO: 138 - protein, 108 aa, Artificial Sequence; identical to SEQ ID NO: 114
  Synthetic polypeptide

SEQ ID NO: 139 - protein, 115 aa, Artificial Sequence
  Synthetic polypeptide
EVQLLESGGGLVQPGGSLRLSCAASGFTFSSYAMSWVRQAPGKGLEWVSSIEEMGWQTLYADSVKGRFTISRDNSKNTLYLQMNSLRAEDTAVYYAKSAAAFDYWGQGTLVTVSS

SEQ ID NO: 140 - protein, 108 aa, Artificial Sequence; identical to SEQ ID NO: 114
  Synthetic polypeptide

SEQ ID NO: 141 - protein, 119 aa, Artificial Sequence; identical to SEQ ID NO: 115
  Synthetic polypeptide

SEQ ID NO: 142 - protein, 108 aa, Artificial Sequence; identical to SEQ ID NO: 114
  Synthetic polypeptide

SEQ ID NO: 143 - protein, 116 aa, Artificial Sequence
  Synthetic polypeptide
EVQLLESGGGLVQPGGSLRLSCAASGFTFSSYAMSWVRQAPGKGLEWVSSIDPEGWQTYYADSVKGRFTISRDNSKNTLYLQMNSLRAEDTAVYYCAKSAAAFDYWGQGTLVTVSS

SEQ ID NO: 144 - protein, 108 aa, Artificial Sequence; identical to SEQ ID NO: 114
  Synthetic polypeptide

SEQ ID NO: 145 - protein, 119 aa, Artificial Sequence
  Synthetic polypeptide
EVQLLESGGGLVQPGGSLRLSCAASGFTFSSYAMSWVRQAPGKGLEWVSSIEQMGWQTYYADSVKGRFTISRDNSKNTLYLQMNSLRAEDTAVYYCAKSPPHNGQFDYWGQGTLVTVSS

SEQ ID NO: 146 - protein, 108 aa, Artificial Sequence; identical to SEQ ID NO: 114
  Synthetic polypeptide

SEQ ID NO: 147 - protein, 116 aa, Artificial Sequence; identical to SEQ ID NO: 123
  Synthetic polypeptide

SEQ ID NO: 148 - protein, 108 aa, Artificial Sequence; identical to SEQ ID NO: 114
  Synthetic polypeptide

SEQ ID NO: 149 - protein, 119 aa, Artificial Sequence; identical to SEQ ID NO: 119
  Synthetic polypeptide

SEQ ID NO: 150 - protein, 108 aa, Artificial Sequence; identical to SEQ ID NO: 114
  Synthetic polypeptide

SEQ ID NO: 151 - protein, 116 aa, Artificial Sequence
  Synthetic polypeptide
EVQLLESGGGLVQPGGSLRLSCAASGFTFSSYAMSWVRQAPGKGLEWVSSIDEMGWQTEYADSVKGRFTISRDNSKNTLYLQMNSLRAEDTAVYYCAKSAAAFDYWGQGTLVTVSS

SEQ ID NO: 152 - protein, 108 aa, Artificial Sequence
  Synthetic polypeptide
DIQMTQSPSSLSASVGDRVTITCRASQSISSYLNWYQQKPGKAPKLLIYAASSLQSGVPSRFSGSGSGTDFTLTISSLQPEDFATYYCQQTLDAPPQFGQGTKVEIKR

SEQ ID NO: 153 - protein, 119 aa, Artificial Sequence; identical to SEQ ID NO: 115
  Synthetic polypeptide

SEQ ID NO: 154 - protein, 108 aa, Artificial Sequence
  Synthetic polypeptide
DIQMTQSPSSLSASVGDRVTITCRASQSISSYLNWYQQKPGKAPKLLIYAASSLQSGVPSRFSGSGSGTDFTLTISSLQPEDFATYYCQQTVVAPPLFGQGTKVEIKR

SEQ ID NO: 155 - protein, 119 aa, Artificial Sequence
  Synthetic polypeptide
EVQLLESGGGLVQPGGSLRLSCAASGFTFSSYAMSWVRQAPGKGLEWVSSIDPEGRQTYYADSVKGRFTISRDNSKNTLYLQMNSLRAEDTAVYYCAKDIGGRSAFDYWGQGTLVTVSS

SEQ ID NO: 156 - protein, 108 aa, Artificial Sequence
  Synthetic polypeptide
DIQMTQSPSSLSASVGDRVTITCRASQSISSYLNWYQQKPGKAPKLLIYAASSLQSGVPSRFSGSGSGTDFTLTISSLQPEDFATYYCQQSLVAPLTFGQGTKVEIKR

SEQ ID NO: 157 - protein, 116 aa, Artificial Sequence
  Synthetic polypeptide
EVQLLESGGGLVQPGGSLRLSCAASGFTFSSYAMSWVRQAPGKGLEWVSSIEEMGWQTKYADSVKGRFTISRDNSKNTLYLQMNSLRAEDTAVYYCAKSAAAFDYWGQGTLVTVSS

SEQ ID NO: 158 - protein, 108 aa, Artificial Sequence
  Synthetic polypeptide
DIQMTQSPSSLSASVGDRVTITCRASQSISSYLNWYQQKPGKAPKLLIYAASSLQSGVPSRFSGSGSGTDFTLTISSLQPEDFATYYCQQALDAPLMFGQGTKVEIKR

SEQ ID NO: 159 - protein, 119 aa, Artificial Sequence
  Synthetic polypeptide
EVQLLESGGGLVQPGGSLRLSCAASGFTFSSYAMSWVRQAPGKGLEWVSSIEPMGQLTEYADSVKGRFTISRDNSKNTLYLQMNSLRAEDTAVYYCAKDIGGRSAFDYWGQGTLVTVSS

SEQ ID NO: 160 - protein, 108 aa, Artificial Sequence
  Synthetic polypeptide
DIQMTQSPSSLSASVGDRVTITCRASQSISSYLNWYQQKPGKAPKLLIYAASSLQSGVPSRFSGSGSGTDFTLTISSLQPEDFATYYCQQALVAPLTFGQGTKVEIKR

SEQ ID NO: 161 - protein, 116 aa, Artificial Sequence
  Synthetic polypeptide
EVQLLESGGGLVQPGGSLRLSCAASGFTFSSYAMSWVRQAPGKGLEWVSSIDEMGWQTYYADSVKGRFTISRDNSKNTLYLQMNSLRAEDTAVYYCAKSAAAFDYWGQGTLVTVSS

SEQ ID NO: 162 - protein, 108 aa, Artificial Sequence; identical to SEQ ID NO: 160
  Synthetic polypeptide

SEQ ID NO: 163 - protein, 116 aa, Artificial Sequence; identical to SEQ ID NO: 161
  Synthetic polypeptide

SEQ ID NO: 164 - protein, 6 aa, Artificial Sequence
  Synthetic oligopeptide
CISPRG

SEQ ID NO: 165 - protein, 7 aa, Artificial Sequence
  Synthetic oligopeptide
CISPRGC

SEQ ID NO: 166 - protein, 8 aa, Artificial Sequence
  Synthetic oligopeptide
CISPRGCG

SEQ ID NO: 167 - protein, 15 aa, Artificial Sequence
  Synthetic oligopeptide
CISPRGCPDGPYVMY

SEQ ID NO: 168 - protein, 14 aa, Artificial Sequence
  Synthetic oligopeptide
CISPRGCPDGPYVM

SEQ ID NO: 169 - protein, 15 aa, Artificial Sequence
  Synthetic oligopeptide
CISPRGCEPGTYVPT

SEQ ID NO: 170 - protein, 15 aa, Artificial Sequence
  Synthetic oligopeptide
CISPRGCPGQIWHPP

SEQ ID NO: 171 - protein, 15 aa, Artificial Sequence
  Synthetic oligopeptide
GSHCLIPINMGAPSC

SEQ ID NO: 172 - protein, 32 aa, Artificial Sequence
  Synthetic polypeptide
CISPRGCGGSSASQSGQGSHCLIPINMGAPSC

SEQ ID NO: 173 - protein, 19 aa, Artificial Sequence
  Synthetic oligopeptide
CNHHYFYTCGCISPRGCPG

SEQ ID NO: 174 - protein, 19 aa, Artificial Sequence
  Synthetic oligopeptide
ADHVFWGSYGCISPRGCPG

SEQ ID NO: 175 - protein, 19 aa, Artificial Sequence
  Synthetic oligopeptide
CHHVYWGHCGCISPRGCPG

SEQ ID NO: 176 - protein, 19 aa, Artificial Sequence
  Synthetic oligopeptide
CPHFTTTSCGCISPRGCPG

SEQ ID NO: 177 - protein, 19 aa, Artificial Sequence
  Synthetic oligopeptide
CNHHYHYYCGCISPRGCPG

SEQ ID NO: 178 - protein, 19 aa, Artificial Sequence
  Synthetic oligopeptide
CPHVSFGSCGCISPRGCPG

SEQ ID NO: 179 - protein, 19 aa, Artificial Sequence
  Synthetic oligopeptide
CPYYTLSYCGCISPRGCPG

SEQ ID NO: 180 - protein, 19 aa, Artificial Sequence
  Synthetic oligopeptide
CNHVYFGTCGCISPRGCPG

SEQ ID NO: 181 - protein, 19 aa, Artificial Sequence
  Synthetic oligopeptide
CNHFTLTTCGCISPRGCPG

SEQ ID NO: 182 - protein, 19 aa, Artificial Sequence
  Synthetic oligopeptide
CHHFTLTTCGCISPRGCPG

SEQ ID NO: 183 - protein, 18 aa, Artificial Sequence
  Synthetic oligopeptide
YNPCATPMCCISPRGCPG

SEQ ID NO: 184 - protein, 18 aa, Artificial Sequence
  Synthetic oligopeptide
CNHHYFYTCGCISPRGCG

SEQ ID NO: 185 - protein, 18 aa, Artificial Sequence
  Synthetic oligopeptide
CNHHYHYYCGCISPRGCG

SEQ ID NO: 186 - protein, 18 aa, Artificial Sequence
  Synthetic oligopeptide
CNHVYFGTCGCISPRGCG

SEQ ID NO: 187 - protein, 18 aa, Artificial Sequence
  Synthetic oligopeptide
CHHVYWGHCGCISPRGCG

SEQ ID NO: 188 - protein, 18 aa, Artificial Sequence
  Synthetic oligopeptide
CPHFTTTSCGCISPRGCG

SEQ ID NO: 189 - protein, 18 aa, Artificial Sequence
  Synthetic oligopeptide
CNHFTLTTCGCISPRGCG

SEQ ID NO: 190 - protein, 18 aa, Artificial Sequence
  Synthetic oligopeptide
CHHFTLTTCGCISPRGCG

SEQ ID NO: 191 - protein, 18 aa, Artificial Sequence
  Synthetic oligopeptide
CPYYTLSYCGCISPRGCG

SEQ ID NO: 192 - protein, 18 aa, Artificial Sequence
  Synthetic oligopeptide
CPHVSFGSCGCISPRGCG

SEQ ID NO: 193 - protein, 18 aa, Artificial Sequence
  Synthetic oligopeptide
ADHVFWGSYGCISPRGCG

SEQ ID NO: 194 - protein, 17 aa, Artificial Sequence
  Synthetic oligopeptide
YNPCATPMCCISPRGCG

SEQ ID NO: 195 - protein, 18 aa, Artificial Sequence
  Synthetic oligopeptide
CHHVYWGHCGCISPRGCG

SEQ ID NO: 196 - protein, 18 aa, Artificial Sequence
  Synthetic oligopeptide
  VARIANT (2)..(2): X is Asn or Pro
  VARIANT (4)..(4): X is His, Val, or Phe
  VARIANT (5)..(5): X is Tyr or Thr
  VARIANT (6)..(6): X is Phe, Trp, Thr, or Leu
  VARIANT (7)..(7): X is Tyr, Gly, Thr, or Ser
  VARIANT (8)..(8): X is Thr, Ser, Tyr, or His
CXHXXXXXCGCISPRGCG

SEQ ID NO: 197 - protein, 15 aa, Artificial Sequence
  Synthetic oligopeptide
CISPRGCGQPIPSVK

SEQ ID NO: 198 - protein, 15 aa, Artificial Sequence
  Synthetic oligopeptide
CISPRGCTQPYHVSR

SEQ ID NO: 199 - protein, 15 aa, Artificial Sequence
  Synthetic oligopeptide
CISPRGCNAVSGLGS

SEQ ID NO: 200 - protein, 21 aa, Artificial Sequence
  Synthetic polypeptide
QGQSGQCNIWLVGGDCRGWQG

SEQ ID NO: 201 - protein, 26 aa, Artificial Sequence
  Synthetic polypeptide
QGQSGQGQQQWCNIWINGGDCRGWNG

SEQ ID NO: 202 - protein, 15 aa, Artificial Sequence
  Synthetic oligopeptide
PWCMQRQDFLRCPQP

SEQ ID NO: 203 - protein, 15 aa, Artificial Sequence
  Synthetic oligopeptide
QLGLPAYMCTFECLR

SEQ ID NO: 204 - protein, 15 aa, Artificial Sequence
  Synthetic oligopeptide
CNLWVSGGDCGGLQG

SEQ ID NO: 205 - protein, 15 aa, Artificial Sequence
  Synthetic oligopeptide
SCSLWTSGSCLPHSP

SEQ ID NO: 206 - protein, 15 aa, Artificial Sequence
  Synthetic oligopeptide
YCLQLPHYMQAMCGR

SEQ ID NO: 207 - protein, 15 aa, Artificial Sequence
  Synthetic oligopeptide
CFLYSCTDVSYWNNT

SEQ ID NO: 208 - protein, 15 aa, Artificial Sequence
  Synthetic oligopeptide
PWCMQRQDYLRCPQP

SEQ ID NO: 209 - protein, 15 aa, Artificial Sequence
  Synthetic oligopeptide
CNLWISGGDCRGLAG

SEQ ID NO: 210 - protein, 15 aa, Artificial Sequence
  Synthetic oligopeptide
CNLWVSGGDCRGVQG

SEQ ID NO: 211 - protein, 15 aa, Artificial Sequence
  Synthetic oligopeptide
CNLWVSGGDCRGLRG

SEQ ID NO: 212 - protein, 15 aa, Artificial Sequence
  Synthetic oligopeptide
CNLWISGGDCRGLPG

SEQ ID NO: 213 - protein, 15 aa, Artificial Sequence
  Synthetic oligopeptide
CNLWVSGGDCRDAPW

SEQ ID NO: 214 - protein, 15 aa, Artificial Sequence
  Synthetic oligopeptide
CNLWVSGGDCRDLLG

SEQ ID NO: 215 - protein, 15 aa, Artificial Sequence
  Synthetic oligopeptide
CNLWVSGGDCRGLQG

SEQ ID NO: 216 - protein, 15 aa, Artificial Sequence
  Synthetic oligopeptide
CNLWLHGGDCRGWQG

SEQ ID NO: 217 - protein, 15 aa, Artificial Sequence
  Synthetic oligopeptide
CNIWLVGGDCRGWQG

SEQ ID NO: 218 - protein, 15 aa, Artificial Sequence
  Synthetic oligopeptide
CTTWFCGGDCGVMRG

SEQ ID NO: 219 - protein, 15 aa, Artificial Sequence
  Synthetic oligopeptide
CNIWGPSVDCGALLG

SEQ ID NO: 220 - protein, 15 aa, Artificial Sequence
  Synthetic oligopeptide
CNIWVNGGDCRSFEG

SEQ ID NO: 221 - protein, 15 aa, Artificial Sequence
  Synthetic oligopeptide
YCLNLPRYMQDMCWA

SEQ ID NO: 222 - protein, 15 aa, Artificial Sequence
  Synthetic oligopeptide
YCLALPHYMQADCAR

SEQ ID NO: 223 - protein, 15 aa, Artificial Sequence
  Synthetic oligopeptide
CFLYSCGDVSYWGSA

SEQ ID NO: 224 - protein, 15 aa, Artificial Sequence
  Synthetic oligopeptide
CYLYSCTDSAFWNNR

SEQ ID NO: 225 - protein, 15 aa, Artificial Sequence
  Synthetic oligopeptide
CYLYSCNDVSYWSNT

SEQ ID NO: 226 - protein, 12 aa, Artificial Sequence
  Synthetic oligopeptide
CFLYSCTDVSYW

SEQ ID NO: 227 - protein, 15 aa, Artificial Sequence
  Synthetic oligopeptide
CFLYSCTDVAYWNSA

SEQ ID NO: 228 - protein, 15 aa, Artificial Sequence
  Synthetic oligopeptide
CFLYSCTDVSYWGDT

SEQ ID NO: 229 - protein, 15 aa, Artificial Sequence
  Synthetic oligopeptide
CFLYSCTDVSYWGNS

SEQ ID NO: 230 - protein, 15 aa, Artificial Sequence
  Synthetic oligopeptide
CFLYSCTDVAYWNNT

SEQ ID NO: 231 - protein, 18 aa, Artificial Sequence
  Synthetic oligopeptide
CFLYSCGDVSYWGNPGLS

SEQ ID NO: 232 - protein, 15 aa, Artificial Sequence
  Synthetic oligopeptide
CFLYSCTDVAYWSGL

SEQ ID NO: 233 - protein, 15 aa, Artificial Sequence
  Synthetic oligopeptide
CYLYSCTDGSYWNST

SEQ ID NO: 234 - protein, 15 aa, Artificial Sequence
  Synthetic oligopeptide
CFLYSCSDVSYWGNI

SEQ ID NO: 235 - protein, 12 aa, Artificial Sequence
  Synthetic oligopeptide
CFLYSCTDVAYW

SEQ ID NO: 236 - protein, 15 aa, Artificial Sequence
  Synthetic oligopeptide
CFLYSCTDVSYWGST

SEQ ID NO: 237 - protein, 15 aa, Artificial Sequence
  Synthetic oligopeptide
CFLYSCTDVAYWGDT

SEQ ID NO: 238 - protein, 20 aa, Artificial Sequence
  Synthetic oligopeptide
GCNIWLNGGDCRGWVDPLQG

SEQ ID NO: 239 - protein, 20 aa, Artificial Sequence
  Synthetic oligopeptide
GCNIWLVGGDCRGWIGDTNG

SEQ ID NO: 240 - protein, 20 aa, Artificial Sequence
  Synthetic oligopeptide
GCNIWLVGGDCRGWIEDSNG

SEQ ID NO: 241 - protein, 20 aa, Artificial Sequence
  Synthetic oligopeptide
GCNIWANGGDCRGWIDNIDG

SEQ ID NO: 242 - protein, 20 aa, Artificial Sequence
  Synthetic oligopeptide
GCNIWLVGGDCRGWLGEAVG

SEQ ID NO: 243 - protein, 20 aa, Artificial Sequence
  Synthetic oligopeptide
GCNIWLVGGDCRGWLEEAVG

SEQ ID NO: 244 - protein, 20 aa, Artificial Sequence
  Synthetic oligopeptide
GGPALCNIWLNGGDCRGWSG

SEQ ID NO: 245 - protein, 20 aa, Artificial Sequence
  Synthetic oligopeptide
GAPVFCNIWLNGGDCRGWMG

SEQ ID NO: 246 - protein, 20 aa, Artificial Sequence
  Synthetic oligopeptide
GQQQWCNIWINGGDCRGWNG

SEQ ID NO: 247 - protein, 20 aa, Artificial Sequence
  Synthetic oligopeptide
GKSEFCNIWLNGGDCRGWIG

SEQ ID NO: 248 - protein, 20 aa, Artificial Sequence
  Synthetic oligopeptide
GTPGGCNIWANGGDCRGWEG

SEQ ID NO: 249 - protein, 20 aa, Artificial Sequence
  Synthetic oligopeptide
GASQYCNLWINGGDCRGWRG

SEQ ID NO: 250 - protein, 18 aa, Artificial Sequence
  Synthetic oligopeptide
GCNIWLVGGDCRPWVEGG

SEQ ID NO: 251 - protein, 18 aa, Artificial Sequence
  Synthetic oligopeptide
GCNIWAVGGDCRPFVDGG

SEQ ID NO: 252 - protein, 18 aa, Artificial Sequence
  Synthetic oligopeptide
GCNIWLNGGDCRAWVDTG

SEQ ID NO: 253 - protein, 18 aa, Artificial Sequence
  Synthetic oligopeptide
GCNIWIVGGDCRPFINDG

SEQ ID NO: 254 - protein, 18 aa, Artificial Sequence
  Synthetic oligopeptide
GCNIWLNGGDCRPVVFGG

SEQ ID NO: 255 - protein, 18 aa, Artificial Sequence
  Synthetic oligopeptide
GCNIWLSGGDCRMFMNEG

SEQ ID NO: 256 - protein, 18 aa, Artificial Sequence
  Synthetic oligopeptide
GCNIWVNGGDCRSFVYSG

SEQ ID NO: 257 - protein, 18 aa, Artificial Sequence
  Synthetic oligopeptide
GCNIWLNGGDCRGWEASG

SEQ ID NO: 258 - protein, 18 aa, Artificial Sequence
  Synthetic oligopeptide
GCNIWAHGGDCRGFIEPG

SEQ ID NO: 259 - protein, 18 aa, Artificial Sequence
  Synthetic oligopeptide
GCNIWLNGGDCRTFVASG

SEQ ID NO: 260 - protein, 18 aa, Artificial Sequence
  Synthetic oligopeptide
GCNIWAHGGDCRGFIEPG

SEQ ID NO: 261 - protein, 18 aa, Artificial Sequence
  Synthetic oligopeptide
GFLENCNIWLNGGDCRTG

SEQ ID NO: 262 - protein, 18 aa, Artificial Sequence
  Synthetic oligopeptide
GIYENCNIWLNGGDCRMG

SEQ ID NO: 263 - protein, 18 aa, Artificial Sequence
  Synthetic oligopeptide
GIPDNCNIWINGGDCRYG

SEQ ID NO: 264 - protein, 21 aa, Artificial Sequence
  Synthetic polypeptide
QGQSGQYGSCSWNYVHIFMDC

SEQ ID NO: 265 - protein, 21 aa, Artificial Sequence
  Synthetic polypeptide
QGQSGQGDFDIPFPAHWVPIT

SEQ ID NO: 266 - protein, 24 aa, Artificial Sequence
  Synthetic polypeptide
QGQSGQMGVPAGCVWNYAHIFMDC

SEQ ID NO: 267 - protein, 15 aa, Artificial Sequence
  Synthetic oligopeptide
YRSCNWNYVSIFLDC

SEQ ID NO: 268 - protein, 16 aa, Artificial Sequence
  Synthetic oligopeptide
PGAFDIPFPAHWVPNT

SEQ ID NO: 269 - protein, 15 aa, Artificial Sequence
  Synthetic oligopeptide
ESSCVWNYVHIYMDC

SEQ ID NO: 270 - protein, 15 aa, Artificial Sequence
  Synthetic oligopeptide
YPGCKWNYDRIFLDC

SEQ ID NO: 271 - protein, 15 aa, Artificial Sequence
  Synthetic oligopeptide
YRTCSWNYVGIFLDC

SEQ ID NO: 272 - protein, 15 aa, Artificial Sequence
  Synthetic oligopeptide
YGSCSWNYVHIFMDC

SEQ ID NO: 273 - protein, 15 aa, Artificial Sequence
  Synthetic oligopeptide
YGSCSWNYVHIFLDC

SEQ ID NO: 274 - protein, 15 aa, Artificial Sequence
  Synthetic oligopeptide
YGSCNWNYVHIFLDC

SEQ ID NO: 275 - protein, 15 aa, Artificial Sequence
  Synthetic oligopeptide
YTSCNWNYVHIFMDC

SEQ ID NO: 276 - protein, 15 aa, Artificial Sequence
  Synthetic oligopeptide
YPGCKWNYDRIFLDC

SEQ ID NO: 277 - protein, 15 aa, Artificial Sequence
  Synthetic oligopeptide
WRSCNWNYAHIFLDC

SEQ ID NO: 278 - protein, 15 aa, Artificial Sequence
  Synthetic oligopeptide
WSNCHWNYVHIFLDC

SEQ ID NO: 279 - protein, 15 aa, Artificial Sequence
  Synthetic oligopeptide
DRSCTWNYVRISYDC

SEQ ID NO: 280 - protein, 15 aa, Artificial Sequence
  Synthetic oligopeptide
SGSCKWDYVHIFLDC

SEQ ID NO: 281 - protein, 15 aa, Artificial Sequence
  Synthetic oligopeptide
SRSCIWNYAHIHLDC

SEQ ID NO: 282 - protein, 15 aa, Artificial Sequence
  Synthetic oligopeptide
SMSCYWQYERIFLDC

SEQ ID NO: 283 - protein, 15 aa, Artificial Sequence
  Synthetic oligopeptide
YRSCNWNYVSIFLDC

SEQ ID NO: 284 - protein, 15 aa, Artificial Sequence
  Synthetic oligopeptide
YGSCSWNYVHIFMDC

SEQ ID NO: 285 - protein, 15 aa, Artificial Sequence
  Synthetic oligopeptide
SGSCKWDYVHIFLDC

SEQ ID NO: 286 - protein, 15 aa, Artificial Sequence
  Synthetic oligopeptide
YKSCHWDYVHIFLDC

SEQ ID NO: 287 - protein, 15 aa, Artificial Sequence
  Synthetic oligopeptide
YGSCTWNYVHIFMEC

SEQ ID NO: 288 - protein, 15 aa, Artificial Sequence
  Synthetic oligopeptide
FSSCNWNYVHIFLDC

SEQ ID NO: 289 - protein, 15 aa, Artificial Sequence
  Synthetic oligopeptide
WRSCNWNYAHIFLDC

SEQ ID NO: 290 - protein, 15 aa, Artificial Sequence
  Synthetic oligopeptide
YGSCQWNYVHIFLDC

SEQ ID NO: 291 - protein, 15 aa, Artificial Sequence
  Synthetic oligopeptide
YRSCNWNYVHIFLDC

SEQ ID NO: 292 - protein, 15 aa, Artificial Sequence
  Synthetic oligopeptide
NMSCHWDYVHIFLDC

SEQ ID NO: 293 - protein, 15 aa, Artificial Sequence
  Synthetic oligopeptide
FGPCTWNYARISWDC

SEQ ID NO: 294 - protein, 15 aa, Artificial Sequence
  Synthetic oligopeptide
  VARIANT (1)..(1): X can be any naturally occuring amino acid
  VARIANT (2)..(2): X can be any naturally occuring amino acid
  VARIANT (5)..(5): X can be any naturally occuring amino acid
  VARIANT (7)..(7): X can be any naturally occuring amino acid
  VARIANT (13)..(13): X can be any naturally occuring amino acid
XXSCXWXYVHIFXDC

SEQ ID NO: 295 - protein, 18 aa, Artificial Sequence
  Synthetic oligopeptide
MGVPAGCVWNYAHIFMDC

SEQ ID NO: 296 - protein, 18 aa, Artificial Sequence
  Synthetic oligopeptide
RDTGGQCRWDYVHIFMDC

SEQ ID NO: 297 - protein, 18 aa, Artificial Sequence
  Synthetic oligopeptide
AGVPAGCTWNYVHIFMEC

SEQ ID NO: 298 - protein, 18 aa, Artificial Sequence
  Synthetic oligopeptide
VGVPNGCVWNYAHIFMEC

SEQ ID NO: 299 - protein, 18 aa, Artificial Sequence
  Synthetic oligopeptide
DGGPAGCSWNYVHIFMEC

SEQ ID NO: 300 - protein, 18 aa, Artificial Sequence
  Synthetic oligopeptide
AVGPAGCWWNYVHIFMEC

SEQ ID NO: 301 - protein, 18 aa, Artificial Sequence
  Synthetic oligopeptide
CTWNYVHIFMDCGEGEGP

SEQ ID NO: 302 - protein, 18 aa, Artificial Sequence
  Synthetic oligopeptide
GGVPEGCTWNYAHIFMEC

SEQ ID NO: 303 - protein, 18 aa, Artificial Sequence
  Synthetic oligopeptide
AEVPAGCWWNYVHIFMEC

SEQ ID NO: 304 - protein, 18 aa, Artificial Sequence
  Synthetic oligopeptide
AGVPAGCTWNYVHIFMEC

SEQ ID NO: 305 - protein, 18 aa, Artificial Sequence
  Synthetic oligopeptide
SGASGGCKWNYVHIFMDC

SEQ ID NO: 306 - protein, 18 aa, Artificial Sequence
  Synthetic oligopeptide
MGVPAGCVWNYAHIFMDC

SEQ ID NO: 307 - protein, 18 aa, Artificial Sequence
  Synthetic oligopeptide
TPGCRWNYVHIFMECEAL

SEQ ID NO: 308 - protein, 18 aa, Artificial Sequence
  Synthetic oligopeptide
VGVPNGCVWNYAHIFMEC

SEQ ID NO: 309 - protein, 16 aa, Artificial Sequence
  Synthetic oligopeptide
PGAFDIPFPAHWVPNT

SEQ ID NO: 310 - protein, 16 aa, Artificial Sequence
  Synthetic oligopeptide
RGACDIPFPAHWIPNT

SEQ ID NO: 311 - protein, 16 aa, Artificial Sequence
  Synthetic oligopeptide
QGDFDIPFPAHWVPIT

SEQ ID NO: 312 - protein, 16 aa, Artificial Sequence
  Synthetic oligopeptide
  VARIANT (1)..(1): X can be any naturally occirung amino acid
XGAFDIPFPAHWVPNT

SEQ ID NO: 313 - protein, 19 aa, Unknown
  Synthetic oligopeptide
RGDGNDSDIPFPAHWVPRT

SEQ ID NO: 314 - protein, 19 aa, Artificial Sequence
  Synthetic oligopeptide
SGVGRDRDIPFPAHWVPRT

SEQ ID NO: 315 - protein, 19 aa, Artificial Sequence
  Synthetic oligopeptide
WAGGNDCDIPFPAHWIPNT

SEQ ID NO: 316 - protein, 19 aa, Artificial Sequence
  Synthetic oligopeptide
WGDGMDVDIPFPAHWVPVT

SEQ ID NO: 317 - protein, 19 aa, Artificial Sequence
  Synthetic oligopeptide
AGSGNDSDIPFPAHWVPRT

SEQ ID NO: 318 - protein, 19 aa, Artificial Sequence
  Synthetic oligopeptide
ESRSGYADIPFPAHWVPRT

SEQ ID NO: 319 - protein, 19 aa, Artificial Sequence
  Synthetic oligopeptide
RECGRCGDIPFPAHWVPRT

SEQ ID NO: 320 - skipped

SEQ ID NO: 321 - protein, 8 aa, Artificial Sequence
  Synthetic oligopeptide
ISSGLLSS

SEQ ID NO: 322 - protein, 8 aa, Artificial Sequence
  Synthetic oligopeptide
QNQALRMA

SEQ ID NO: 323 - protein, 8 aa, Artificial Sequence
  Synthetic oligopeptide
AQNLLGMV

SEQ ID NO: 324 - protein, 8 aa, Artificial Sequence
  Synthetic oligopeptide
STFPFGMF

SEQ ID NO: 325 - protein, 8 aa, Artificial Sequence
  Synthetic oligopeptide
PVGYTSSL

SEQ ID NO: 326 - protein, 8 aa, Artificial Sequence
  Synthetic oligopeptide
DWLYWPGI

SEQ ID NO: 327 - protein, 8 aa, Artificial Sequence
  Synthetic oligopeptide
MIAPVAYR

SEQ ID NO: 328 - protein, 8 aa, Artificial Sequence
  Synthetic oligopeptide
RPSPMWAY

SEQ ID NO: 329 - protein, 8 aa, Artificial Sequence
  Synthetic oligopeptide
WATPRPMR

SEQ ID NO: 330 - protein, 8 aa, Artificial Sequence
  Synthetic oligopeptide
FRLLDWQW

SEQ ID NO: 331 - protein, 8 aa, Artificial Sequence
  Synthetic oligopeptide
LKAAPRWA

SEQ ID NO: 332 - protein, 8 aa, Artificial Sequence
  Synthetic oligopeptide
GPSHLVLT

SEQ ID NO: 333 - protein, 8 aa, Artificial Sequence
  Synthetic oligopeptide
LPGGLSPW

SEQ ID NO: 334 - protein, 8 aa, Artificial Sequence
  Synthetic oligopeptide
MGLFSEAG

SEQ ID NO: 335 - protein, 8 aa, Artificial Sequence
  Synthetic oligopeptide
SPLPLRVP

SEQ ID NO: 336 - protein, 8 aa, Artificial Sequence
  Synthetic oligopeptide
RMHLRSLG

SEQ ID NO: 337 - protein, 8 aa, Artificial Sequence
  Synthetic oligopeptide
LAAPLGLL

SEQ ID NO: 338 - protein, 8 aa, Artificial Sequence
  Synthetic oligopeptide
AVGLLAPP

SEQ ID NO: 339 - protein, 8 aa, Artificial Sequence
  Synthetic oligopeptide
LLAPSHRA

SEQ ID NO: 340 - protein, 8 aa, Artificial Sequence
  Synthetic oligopeptide
PAGLWLDP

SEQ ID NO: 341 - protein, 7 aa, Artificial Sequence
  Synthetic oligopeptide
ISSGLSS

SEQ ID NO: 342 - protein, 8 aa, Unknown
  Pro-urokinase peptide
PRFKIIGG

SEQ ID NO: 343 - protein, 8 aa, Unknown
  Pro-urokinase peptide
PRFRIIGG

SEQ ID NO: 344 - protein, 9 aa, Unknown
  TGFbeta peptide
SSRHRRALD

SEQ ID NO: 345 - protein, 14 aa, Unknown
  Plasminogen peptide
RKSSIIIRMRDVVL

SEQ ID NO: 346 - protein, 15 aa, Unknown
  Staphylokinase peptide
SSSFDKGKYKKGDDA

SEQ ID NO: 347 - protein, 15 aa, Unknown
  Staphylokinase peptide
SSSFDKGKYKRGDDA

SEQ ID NO: 348 - protein, 4 aa, Unknown
  Factor Xa cleavable sequence
IEGR

SEQ ID NO: 349 - protein, 4 aa, Unknown
  Factor Xa cleavable sequence
IDGR

SEQ ID NO: 350 - protein, 7 aa, Unknown
  Factor Xa cleavable sequence
GGSIDGR

SEQ ID NO: 351 - protein, 6 aa, Unknown
  Gelatinase A peptide
PLGLWA

SEQ ID NO: 352 - protein, 8 aa, Bos taurus
GPQGIAGQ

SEQ ID NO: 353 - protein, 8 aa, Bos taurus
GPQGLLGA

SEQ ID NO: 354 - protein, 5 aa, Bos taurus
GIAGQ

SEQ ID NO: 355 - protein, 8 aa, Bos taurus
GPLGIAGI

SEQ ID NO: 356 - protein, 8 aa, Homo sapiens
GPEGLRVG

SEQ ID NO: 357 - protein, 8 aa, Homo sapiens
YGAGLGVV

SEQ ID NO: 358 - protein, 8 aa, Homo sapiens
AGLGVVER

SEQ ID NO: 359 - protein, 8 aa, Homo sapiens
AGLGISST

SEQ ID NO: 360 - protein, 8 aa, Rattus sp.
EPQALAMS

SEQ ID NO: 361 - protein, 8 aa, Rattus sp.
QALAMSAI

SEQ ID NO: 362 - protein, 8 aa, Rattus sp.
AAYHLVSQ

SEQ ID NO: 363 - protein, 8 aa, Rattus sp.
MDAFLESS

SEQ ID NO: 364 - protein, 8 aa, Rattus sp.
ESLPVVAV

SEQ ID NO: 365 - protein, 8 aa, Rattus sp.
SAPAVESE

SEQ ID NO: 366 - protein, 8 aa, Homo sapiens
DVAQFVLT

SEQ ID NO: 367 - protein, 8 aa, Homo sapiens
VAQFVLTE

SEQ ID NO: 368 - protein, 8 aa, Homo sapiens
AQFVLTEG

SEQ ID NO: 369 - protein, 8 aa, Homo sapiens
PVQPIGPQ

SEQ ID NO: 370 - DNA, 87 bp, Artificial Sequence
  Synthetic polynucleotide
caaggccagtctggccaaatgatgtattgcggtgggaatgaggtgttgtgcgggccgcgggttggctcgagcggtggcagcggtggc

SEQ ID NO: 371 - protein, 15 aa, Artificial Sequence
  Synthetic oligopeptide
YSLWGCEWGCDRGLY

SEQ ID NO: 372 - protein, 15 aa, Artificial Sequence
  Synthetic oligopeptide
GYRWGCEWNCGGITT

SEQ ID NO: 373 - protein, 15 aa, Artificial Sequence
  Synthetic oligopeptide
YSACEMFGEVECCFC

SEQ ID NO: 374 - protein, 15 aa, Artificial Sequence
  Synthetic oligopeptide
WYSGGCEAFCGILSS

SEQ ID NO: 375 - protein, 15 aa, Artificial Sequence
  Synthetic oligopeptide
GYSGGCEFRCYQLYS

SEQ ID NO: 376 - protein, 15 aa, Artificial Sequence
  Synthetic oligopeptide
KFCHCGYYCRVCTLK

SEQ ID NO: 377 - protein, 15 aa, Artificial Sequence
  Synthetic oligopeptide
LGCNNLWGNEFCHPV

SEQ ID NO: 378 - protein, 15 aa, Artificial Sequence
  Synthetic oligopeptide
GHPCWGNESYCHTHS

SEQ ID NO: 379 - protein, 15 aa, Artificial Sequence
  Synthetic oligopeptide
GNNKWCNKPCKCWNK

SEQ ID NO: 380 - protein, 15 aa, Artificial Sequence
  Synthetic oligopeptide
VYYCGGNESLCGERR

SEQ ID NO: 381 - protein, 15 aa, Artificial Sequence
  Synthetic oligopeptide
WMTFGCEFSCGTDEW

SEQ ID NO: 382 - protein, 15 aa, Artificial Sequence
  Synthetic oligopeptide
VYHWGCEYDCFFNDM

SEQ ID NO: 383 - protein, 15 aa, Artificial Sequence
  Synthetic oligopeptide
FSGCCRGWYNCCHRG

SEQ ID NO: 384 - protein, 15 aa, Artificial Sequence
  Synthetic oligopeptide
FMCQQRMWGNEFCHQ

SEQ ID NO: 385 - protein, 15 aa, Artificial Sequence
  Synthetic oligopeptide
MMYCGGNEVLCGPRV

SEQ ID NO: 386 - protein, 15 aa, Artificial Sequence
  Synthetic oligopeptide
TYSKCRYTVKCTKHN

SEQ ID NO: 387 - protein, 15 aa, Artificial Sequence
  Synthetic oligopeptide
WYSGGCEAFCGILSS

SEQ ID NO: 388 - protein, 15 aa, Artificial Sequence
  Synthetic oligopeptide
KYHCTRTSACCTKHH

SEQ ID NO: 389 - protein, 15 aa, Artificial Sequence
  Synthetic oligopeptide
NCFDPYMLLTYSCNS

SEQ ID NO: 390 - protein, 15 aa, Artificial Sequence
  Synthetic oligopeptide
GMCGNLWGDESRCWW

SEQ ID NO: 391 - protein, 15 aa, Artificial Sequence
  Synthetic oligopeptide
SCWDPYMMMNYICNI

SEQ ID NO: 392 - DNA, 58 bp, Artificial Sequence
  Synthetic polynucleotide
acttgtcacgaattcggaagtgcagctggtggaatctgggggcggactggtgcagcct

SEQ ID NO: 393 - DNA, 48 bp, Artificial Sequence
  Synthetic polynucleotide
tagactcgagcggccgctcatttacccggagacagggagaggctcttc

SEQ ID NO: 394 - DNA, 77 bp, Artificial Sequence
  Synthetic polynucleotide
tcggcggaggcaccaagctgaccgtgctgggcggctccctggaccctaagtcatctgacaaaactcacacatgccca

SEQ ID NO: 395 - DNA, 77 bp, Artificial Sequence
  Synthetic polynucleotide
tgggcatgtgtgagttttgtcagatgacttagggtccagggagccgcccagcacggtcagcttggtgcctccgccga

SEQ ID NO: 396 - DNA, 50 bp, Artificial Sequence
  Synthetic polynucleotide
tgcacttgtcacgaattcgcaggctgtcgtgacacaggaaagcgccctga

SEQ ID NO: 397 - DNA, 51 bp, Artificial Sequence
  Synthetic polynucleotide
tctagactcgagcggccgctcatttacccggagacagggagaggctcttct

SEQ ID NO: 398 - DNA, 81 bp, Artificial Sequence
  Synthetic polynucleotide
tggggccagggcaccctcgtgacagtgtctgctggcggctccctggaccctaagtcatctgacaaaactcacacatgccca

SEQ ID NO: 399 - DNA, 81 bp, Artificial Sequence
  Synthetic polynucleotide
tgggcatgtgtgagttttgtcagatgacttagggtccagggagccgccagcagacactgtcacgagggtgccctggcccca

SEQ ID NO: 400 - DNA, 91 bp, Artificial Sequence
  Synthetic polynucleotide
agcggtggctctggtggtctgagcggccgttccgataatcatggcggcggttctcaggctgtcgtgacacaggaaagcgccctgaccacca

SEQ ID NO: 401 - DNA, 79 bp, Artificial Sequence
  Synthetic polynucleotide
ctaagtcttgcacttgtcacgaattcgcaaggccagtctggccaagggtaccaaggctcgagcggtggcagcggtggct

SEQ ID NO: 402 - DNA, 64 bp, Artificial Sequence
  Synthetic polynucleotide
tccgggccacccattccagtcccttgccaggggcctggcgcacccaattcatggcgtaggtgtt

SEQ ID NO: 403 - DNA, 87 bp, Artificial Sequence
  Synthetic polynucleotide
caaggccagtctggccaaggttatcggtggggttgcgagtggaattgcggtgggattactactggctcgagcggtggcagcggtggc

SEQ ID NO: 404 - DNA, 87 bp, Artificial Sequence
  Synthetic polynucleotide
caaggccagtctggccaatggtattcgggtgggtgcgaggctttttgcggtattttgtcgtcgggctcgagcggtggcagcggtggc

SEQ ID NO: 405 - DNA, 87 bp, Artificial Sequence
  Synthetic polynucleotide
caaggccagtctggccaagtttattattgcggtgggaatgagagtctgtgcggtgagaggaggggctcgagcggtggcagcggtggc

SEQ ID NO: 406 - DNA, 87 bp, Artificial Sequence
  Synthetic polynucleotide
caaggccagtctggccaatttatgtgccagcagcggatgtgggggaatgagttttgccatcagggctcgagcggtggcagcggtggc

SEQ ID NO: 407 - protein, 6 aa, Artificial Sequence
  Synthetic oligopeptide
QGQSGQ

SEQ ID NO: 408 - protein, 5 aa, Artificial Sequence
  Synthetic oligopeptide
QGQSG

SEQ ID NO: 409 - protein, 4 aa, Artificial Sequence
  Synthetic oligopeptide
QGQS

SEQ ID NO: 410-411 - skipped (2 entries)

SEQ ID NO: 412 - protein, 7 aa, Artificial Sequence
  Synthetic oligopeptide
QGQSGQG

SEQ ID NO: 413 - DNA, 41 bp, Artificial Sequence
  Synthetic polynucleotide
gccttggagaaccctgtgttctttgctgataccagtgtatg

SEQ ID NO: 414 - DNA, 51 bp, Artificial Sequence
  Synthetic polynucleotide
tttaaaatgaacagtctgcaatctcaggacacagccatatattactgtgcc

SEQ ID NO: 415 - DNA, 51 bp, Artificial Sequence
  Synthetic polynucleotide
ggcacagtaatatatggctgtgtcctgagattgcagactgttcattttaaa

SEQ ID NO: 416 - DNA, 33 bp, Artificial Sequence
  Synthetic polynucleotide
cgggaggagcagtaccagagcacgtaccgtgtg

SEQ ID NO: 417 - DNA, 33 bp, Artificial Sequence
  Synthetic polynucleotide
cacacggtacgtgctctggtactgctcctcccg

SEQ ID NO: 418 - DNA, 23 bp, Artificial Sequence
  Synthetic polynucleotide
caccccattgacgtcaatgggag

SEQ ID NO: 419 - DNA, 23 bp, Artificial Sequence
  Synthetic polynucleotide
gaggggcaaacaacagatggctg

SEQ ID NO: 420 - DNA, 31 bp, Artificial Sequence
  Synthetic polynucleotide
tgaaccgtcagatcactagaagctttattgc

SEQ ID NO: 421 - DNA, 24 bp, Artificial Sequence
  Synthetic polynucleotide
tggatgtgcaccaggtgtgacagc

SEQ ID NO: 422 - DNA, 50 bp, Artificial Sequence
  Synthetic polynucleotide
ctggctgtcacacctggtgcacatccagaggtgcagctggtcgagtctgg

SEQ ID NO: 423 - DNA, 53 bp, Artificial Sequence
  Synthetic polynucleotide
agctgcacctgggatccaccacctcctaggacagtcagtttggttcctccacc

SEQ ID NO: 424 - DNA, 28 bp, Artificial Sequence
  Synthetic polynucleotide
acatctagcaccacgcagccatagtagc

SEQ ID NO: 425 - DNA, 37 bp, Artificial Sequence
  Synthetic polynucleotide
gtgaccacggtctgagaaccgccgccatgattatcgg

SEQ ID NO: 426 - DNA, 35 bp, Artificial Sequence
  Synthetic polynucleotide
ggcggcggttctcagaccgtggtcacacaggagcc

SEQ ID NO: 427 - DNA, 59 bp, Artificial Sequence
  Synthetic polynucleotide
ctctgtttcagctgcacctgggatccaccacctcctgaggagacggtgaccagtgtccc

SEQ ID NO: 428 - DNA, 22 bp, Artificial Sequence
  Synthetic polynucleotide
agaaccgccgccatgattatcg

SEQ ID NO: 429 - DNA, 50 bp, Artificial Sequence
  Synthetic polynucleotide
cgttccgataatcatggcggcggttctgaggtgcagctggtcgagtctgg

SEQ ID NO: 430 - DNA, 52 bp, Artificial Sequence
  Synthetic polynucleotide
ctggctgtcacacctggtgcacatccacaaggccagtctggccaaggttatc

SEQ ID NO: 431 - DNA, 51 bp, Artificial Sequence
  Synthetic polynucleotide
ctggctgtcacacctggtgcacatccacaaggccagtctggccaaatgatg

SEQ ID NO: 432 - DNA, 56 bp, Artificial Sequence
  Synthetic polynucleotide
ctcctgctactatggctgcgtggtgctagatgtcagaccgtggtcacacaggagcc

SEQ ID NO: 433 - DNA, 63 bp, Artificial Sequence
  Synthetic polynucleotide
ctcctgctactatggctgcgtggtgctagatgtgacatccagatgactcagtctcctagctcc

SEQ ID NO: 434 - DNA, 23 bp, Artificial Sequence
  Synthetic polynucleotide
gaagacagatggtgcagccaccg

SEQ ID NO: 435 - DNA, 49 bp, Artificial Sequence
  Synthetic polynucleotide
ctggctgtcacacctggtgcacatccacaggtgcagctgcaggagtccg

SEQ ID NO: 436 - DNA, 21 bp, Artificial Sequence
  Synthetic polynucleotide
gctagcaccaagggcccatcg

SEQ ID NO: 437 - DNA, 21 bp, Artificial Sequence
  Synthetic polynucleotide
ggaagaccgatgggcccttgg

SEQ ID NO: 438 - DNA, 47 bp, Artificial Sequence
  Synthetic polynucleotide
gccctctagactcgagcggccgctcatttacccggagacagggagag

SEQ ID NO: 439 - DNA, 58 bp, Artificial Sequence
  Synthetic polynucleotide
gcaggacccatactggccagactggccttgacatctagcaccacgcagccatagtagc

SEQ ID NO: 440 - DNA, 37 bp, Artificial Sequence
  Synthetic polynucleotide
ggaggtggtggatcccaggtgcagctgcaggagtccg

SEQ ID NO: 441 - DNA, 37 bp, Artificial Sequence
  Synthetic polynucleotide
cagctgcacctgggatccaccacctcctgaggagacg

SEQ ID NO: 442 - DNA, 22 bp, Artificial Sequence
  Synthetic polynucleotide
accgatgggcccttggtgctag

SEQ ID NO: 443 - DNA, 22 bp, Artificial Sequence
  Synthetic polynucleotide
gaccacggtctgagaaccgccg

SEQ ID NO: 444 - DNA, 23 bp, Artificial Sequence
  Synthetic polynucleotide
cacctggtgcacatccacaaggc

SEQ ID NO: 445 - DNA, 2112 bp, Artificial Sequence
  Synthetic polynucleotide
gaggtgcagctggtcgagtctggaggaggattggtgcagcctggagggtcattgaaactctcatgtgcagcctctggattcaccttcaataagtacgccatgaactgggtccgccaggctccaggaaagggtttggaatgggttgctcgcataagaagtaaatataataattatgcaacatattatgccgattcagtgaaagacaggttcaccatctccagagatgattcaaaaaacactgcctatctacaaatgaacaacttgaaaactgaggacactgccgtgtactactgtgtgagacatgggaacttcggtaatagctacatatcctactgggcttactggggccaagggactctggtcaccgtctcctcaggtggtggtggttctggcggcggcggctccggtggtggtggttctcagactgttgtgactcaggaaccttcactcaccgtatcacctggtggaacagtcacactcacttgtggctcctcgactggggctgttacatctggctactacccaaactgggtccaacaaaaaccaggtcaggcaccccgtggtctaataggtgggactaagttcctcgcccccggtactcctgccagattctcaggctccctgcttggaggcaaggctgccctcaccctctcaggggtacagccagaggatgaggcagaatattactgtgctctatggtacagcaaccgctgggtgttcggtggaggaaccaaactgactgtcctaggaggtggtggatcccaggtgcagctgaaacagagcggcccgggcctggtgcagccgagccagagcctgagcattacctgcaccgtgagcggctttagcctgaccaactatggcgtgcattgggtgcgccagagcccgggcaaaggcctggaatggctgggcgtgatttggagcggcggcaacaccgattataacaccccgtttaccagccgcctgagcattaacaaagataacagcaaaagccaggtgttttttaaaatgaacagcctgcaaagccaggataccgcgatttattattgcgcgcgcgcgctgacctattatgattatgaatttgcgtattggggccagggcaccctggtgaccgtgagcgcggctagcaccaagggcccatcggtcttccccctggcaccctcctccaagagcacctctgggggcacagcggccctgggctgcctggtcaaggactacttccccgaaccggtgacggtgtcgtggaactcaggcgccctgaccagcggcgtgcacaccttcccggctgtcctacagtcctcaggactctactccctcagcagcgtggtgaccgtgccctccagcagcttgggcacccagacctacatctgcaacgtgaatcacaagcccagcaacaccaaggtggacaagaaagttgagcccaaatcttgtgacaaaactcacacatgcccaccgtgcccagcacctgaactcctggggggaccgtcagtcttcctcttccccccaaaacccaaggacaccctcatgatctcccggacccctgaggtcacatgcgtggtggtggacgtgagccacgaagaccctgaggtcaagttcaactggtacgtggacggcgtggaggtgcataatgccaagacaaagccgcgggaggagcagtaccagagcacgtaccgtgtggtcagcgtcctcaccgtcctgcaccaggactggctgaatggcaaggagtacaagtgcaaggtctccaacaaagccctcccagcccccatcgagaaaaccatctccaaagccaaagggcagccccgagaaccacaggtgtacaccctgcccccatcccgggaggagatgaccaagaaccaggtcagcctgacctgcctggtcaaaggcttctatcccagcgacatcgccgtggagtgggagagcaatgggcagccggagaacaactacaagaccacgcctcccgtgctggactccgacggctccttcttcctctacagcaagctcaccgtggacaagagcaggtggcagcaggggaacgtcttctcatgctccgtgatgcatgaggctctgcacaaccactacacgcagaagagcctctccctgtctccgggtaaatga

SEQ ID NO: 446 - protein, 703 aa, Artificial Sequence
  Synthetic polypeptide
EVQLVESGGGLVQPGGSLKLSCAASGFTFNKYAMNWVRQAPGKGLEWVARIRSKYNNYATYYADSVKDRFTISRDDSKNTAYLQMNNLKTEDTAVYYCVRHGNFGNSYISYWAYWGQGTLVTVSSGGGGSGGGGSGGGGSQTVVTQEPSLTVSPGGTVTLTCGSSTGAVTSGYYPNWVQQKPGQAPRGLIGGTKFLAPGTPARFSGSLLGGKAALTLSGVQPEDEAEYYCALWYSNRWVFGGGTKLTVLGGGGSQVQLKQSGPGLVQPSQSLSITCTVSGFSLTNYGVHWVRQSPGKGLEWLGVIWSGGNTDYNTPFTSRLSINKDNSKSQVFFKMNSLQSQDTAIYYCARALTYYDYEFAYWGQGTLVTVSAASTKGPSVFPLAPSSKSTSGGTAALGCLVKDYFPEPVTVSWNSGALTSGVHTFPAVLQSSGLYSLSSVVTVPSSSLGTQTYICNVNHKPSNTKVDKKVEPKSCDKTHTCPPCPAPELLGGPSVFLFPPKPKDTLMISRTPEVTCVVVDVSHEDPEVKFNWYVDGVEVHNAKTKPREEQYQSTYRVVSVLTVLHQDWLNGKEYKCKVSNKALPAPIEKTISKAKGQPREPQVYTLPPSREEMTKNQVSLTCLVKGFYPSDIAVEWESNGQPENNYKTTPPVLDSDGSFFLYSKLTVDKSRWQQGNVFSCSVMHEALHNHYTQKSLSLSPGK

SEQ ID NO: 447 - DNA, 645 bp, Artificial Sequence
  Synthetic polynucleotide
gatatcttgctgacccagagcccggtgattctgagcgtgagcccgggcgaacgtgtgagctttagctgccgcgcgagccagagcattggcaccaacattcattggtatcagcagcgcaccaacggcagcccgcgcctgctgattaaatatgcgagcgaaagcattagcggcattccgagccgctttagcggcagcggcagcggcaccgattttaccctgagcattaacagcgtggaaagcgaagatattgcggattattattgccagcagaacaacaactggccgaccacctttggcgcgggcaccaaactggaactgaaacgtacggtggctgcaccatctgtcttcatcttcccgccatctgatgagcagttgaaatctggaactgcctctgttgtgtgcctgctgaataacttctatcccagagaggccaaagtacagtggaaggtggataacgccctccaatcgggtaactcccaggagagtgtcacagagcaggacagcaaggacagcacctacagcctcagcagcaccctgacgctgagcaaagcagactacgagaaacacaaagtctacgcctgcgaagtcacccatcagggcctgagctcgcccgtcacaaagagcttcaacaggggagagtgttag

SEQ ID NO: 448 - protein, 214 aa, Artificial Sequence
  Synthetic polypeptide
DILLTQSPVILSVSPGERVSFSCRASQSIGTNIHWYQQRTNGSPRLLIKYASESISGIPSRFSGSGSGTDFTLSINSVESEDIADYYCQQNNNWPTTFGAGTKLELKRTVAAPSVFIFPPSDEQLKSGTASVVCLLNNFYPREAKVQWKVDNALQSGNSQESVTEQDSKDSTYSLSSTLTLSKADYEKHKVYACEVTHQGLSSPVTKSFNRGEC

SEQ ID NO: 449 - DNA, 786 bp, Artificial Sequence
  Synthetic polynucleotide
caaggccagtctggccagtgcatctcacctcgtggttgtccggacggcccatacgtcatgtacggctcgagcggtggcagcggtggctctggtggatccggtctgagcggccgttccgataatcatggcagtagcggtacccagatcttgctgacccagagcccggtgattctgagcgtgagcccgggcgaacgtgtgagctttagctgccgcgcgagccagagcattggcaccaacattcattggtatcagcagcgcaccaacggcagcccgcgcctgctgattaaatatgcgagcgaaagcattagcggcattccgagccgctttagcggcagcggcagcggcaccgattttaccctgagcattaacagcgtggaaagcgaagatattgcggattattattgccagcagaacaacaactggccgaccacctttggcgcgggcaccaaactggaactgaaacgtacggtggctgcaccatctgtcttcatcttcccgccatctgatgagcagttgaaatctggaactgcctctgttgtgtgcctgctgaataacttctatcccagagaggccaaagtacagtggaaggtggataacgccctccaatcgggtaactcccaggagagtgtcacagagcaggacagcaaggacagcacctacagcctcagcagcaccctgacgctgagcaaagcagactacgagaaacacaaagtctacgcctgcgaagtcacccatcagggcctgagctcgcccgtcacaaagagcttcaacaggggagagtgttag

SEQ ID NO: 450 - protein, 261 aa, Artificial Sequence
  Synthetic polypeptide
QGQSGQCISPRGCPDGPYVMYGSSGGSGGSGGSGLSGRSDNHGSSGTQILLTQSPVILSVSPGERVSFSCRASQSIGTNIHWYQQRTNGSPRLLIKYASESISGIPSRFSGSGSGTDFTLSINSVESEDIADYYCQQNNNWPTTFGAGTKLELKRTVAAPSVFIFPPSDEQLKSGTASVVCLLNNFYPREAKVQWKVDNALQSGNSQESVTEQDSKDSTYSLSSTLTLSKADYEKHKVYACEVTHQGLSSPVTKSFNRGEC

SEQ ID NO: 451 - DNA, 2244 bp, Artificial Sequence
  Synthetic polynucleotide
caaggccagtctggccaaatgatgtattgcggtgggaatgaggtgttgtgcgggccgcgggttggctcgagcggtggcagcggtggctctggtggtctgagcggccgttccgataatcatggcggcggttctcagaccgtggtcacacaggagccctcactgacagtgagccctggcgggaccgtcacactgacttgtcgcagttcaactggcgccgtgactaccagcaattacgctaactgggtccagcagaaaccaggacaggcaccacgaggactgatcggaggaactaataagagagcaccaggaacccctgcaaggttctccggatctctgctggggggaaaagccgctctgacactgagcggcgtgcagcctgaggacgaagctgagtactattgcgcactgtggtactccaacctgtgggtgtttggcgggggaactaagctgaccgtcctgggaggaggaggaagcggaggaggagggagcggaggaggaggatccgaagtgcagctggtcgagagcggaggaggactggtgcagccaggaggatccctgaagctgtcttgtgcagccagtggcttcaccttcaacacttacgcaatgaactgggtgcggcaggcacctgggaagggactggaatgggtcgcccggatcagatctaaatacaataactatgccacctactatgctgacagtgtgaaggataggttcaccatttcacgcgacgatagcaaaaacacagcttatctgcagatgaataacctgaagaccgaggatacagcagtgtactattgcgtcagacacggcaatttcgggaactcttacgtgagttggtttgcctattggggacaggggacactggtcaccgtctcctcaggaggtggtggatcccaggtgcagctgaaacagagcggcccgggcctggtgcagccgagccagagcctgagcattacctgcaccgtgagcggctttagcctgaccaactatggcgtgcattgggtgcgccagagcccgggcaaaggcctggaatggctgggcgtgatttggagcggcggcaacaccgattataacaccccgtttaccagccgcctgagcattaacaaagataacagcaaaagccaggtgttttttaaaatgaacagcctgcaaagccaggataccgcgatttattattgcgcgcgcgcgctgacctattatgattatgaatttgcgtattggggccagggcaccctggtgaccgtgagcgcggctagcaccaagggcccatcggtcttccccctggcaccctcctccaagagcacctctgggggcacagcggccctgggctgcctggtcaaggactacttccccgaaccggtgacggtgtcgtggaactcaggcgccctgaccagcggcgtgcacaccttcccggctgtcctacagtcctcaggactctactccctcagcagcgtggtgaccgtgccctccagcagcttgggcacccagacctacatctgcaacgtgaatcacaagcccagcaacaccaaggtggacaagaaagttgagcccaaatcttgtgacaaaactcacacatgcccaccgtgcccagcacctgaactcctggggggaccgtcagtcttcctcttccccccaaaacccaaggacaccctcatgatctcccggacccctgaggtcacatgcgtggtggtggacgtgagccacgaagaccctgaggtcaagttcaactggtacgtggacggcgtggaggtgcataatgccaagacaaagccgcgggaggagcagtaccagagcacgtaccgtgtggtcagcgtcctcaccgtcctgcaccaggactggctgaatggcaaggagtacaagtgcaaggtctccaacaaagccctcccagcccccatcgagaaaaccatctccaaagccaaagggcagccccgagaaccacaggtgtacaccctgcccccatcccgggaggagatgaccaagaaccaggtcagcctgacctgcctggtcaaaggcttctatcccagcgacatcgccgtggagtgggagagcaatgggcagccggagaacaactacaagaccacgcctcccgtgctggactccgacggctccttcttcctctacagcaagctcaccgtggacaagagcaggtggcagcaggggaacgtcttctcatgctccgtgatgcatgaggctctgcacaaccactacacgcagaagagcctctccctgtctccgggtaaatga

SEQ ID NO: 452 - protein, 747 aa, Artificial Sequence
  Synthetic polypeptide
QGQSGQMMYCGGNEVLCGPRVGSSGGSGGSGGLSGRSDNHGGGSQTVVTQEPSLTVSPGGTVTLTCRSSTGAVTTSNYANWVQQKPGQAPRGLIGGTNKRAPGTPARFSGSLLGGKAALTLSGVQPEDEAEYYCALWYSNLWVFGGGTKLTVLGGGGSGGGGSGGGGSEVQLVESGGGLVQPGGSLKLSCAASGFTFNTYAMNWVRQAPGKGLEWVARIRSKYNNYATYYADSVKDRFTISRDDSKNTAYLQMNNLKTEDTAVYYCVRHGNFGNSYVSWFAYWGQGTLVTVSSGGGGSQVQLKQSGPGLVQPSQSLSITCTVSGFSLTNYGVHWVRQSPGKGLEWLGVIWSGGNTDYNTPFTSRLSINKDNSKSQVFFKMNSLQSQDTAIYYCARALTYYDYEFAYWGQGTLVTVSAASTKGPSVFPLAPSSKSTSGGTAALGCLVKDYFPEPVTVSWNSGALTSGVHTFPAVLQSSGLYSLSSVVTVPSSSLGTQTYICNVNHKPSNTKVDKKVEPKSCDKTHTCPPCPAPELLGGPSVFLFPPKPKDTLMISRTPEVTCVVVDVSHEDPEVKFNWYVDGVEVHNAKTKPREEQYQSTYRVVSVLTVLHQDWLNGKEYKCKVSNKALPAPIEKTISKAKGQPREPQVYTLPPSREEMTKNQVSLTCLVKGFYPSDIAVEWESNGQPENNYKTTPPVLDSDGSFFLYSKLTVDKSRWQQGNVFSCSVMHEALHNHYTQKSLSLSPGK

SEQ ID NO: 453 - DNA, 2244 bp, Artificial Sequence
  Synthetic polynucleotide
caaggccagtctggccaaggttatcggtggggttgcgagtggaattgcggtgggattactactggctcgagcggtggcagcggtggctctggtggtctgagcggccgttccgataatcatggcggcggttctcagaccgtggtcacacaggagccctcactgacagtgagccctggcgggaccgtcacactgacttgtcgcagttcaactggcgccgtgactaccagcaattacgctaactgggtccagcagaaaccaggacaggcaccacgaggactgatcggaggaactaataagagagcaccaggaacccctgcaaggttctccggatctctgctggggggaaaagccgctctgacactgagcggcgtgcagcctgaggacgaagctgagtactattgcgcactgtggtactccaacctgtgggtgtttggcgggggaactaagctgaccgtcctgggaggaggaggaagcggaggaggagggagcggaggaggaggatccgaagtgcagctggtcgagagcggaggaggactggtgcagccaggaggatccctgaagctgtcttgtgcagccagtggcttcaccttcaacacttacgcaatgaactgggtgcggcaggcacctgggaagggactggaatgggtcgcccggatcagatctaaatacaataactatgccacctactatgctgacagtgtgaaggataggttcaccatttcacgcgacgatagcaaaaacacagcttatctgcagatgaataacctgaagaccgaggatacagcagtgtactattgcgtcagacacggcaatttcgggaactcttacgtgagttggtttgcctattggggacaggggacactggtcaccgtctcctcaggaggtggtggatcccaggtgcagctgaaacagagcggcccgggcctggtgcagccgagccagagcctgagcattacctgcaccgtgagcggctttagcctgaccaactatggcgtgcattgggtgcgccagagcccgggcaaaggcctggaatggctgggcgtgatttggagcggcggcaacaccgattataacaccccgtttaccagccgcctgagcattaacaaagataacagcaaaagccaggtgttttttaaaatgaacagcctgcaaagccaggataccgcgatttattattgcgcgcgcgcgctgacctattatgattatgaatttgcgtattggggccagggcaccctggtgaccgtgagcgcggctagcaccaagggcccatcggtcttccccctggcaccctcctccaagagcacctctgggggcacagcggccctgggctgcctggtcaaggactacttccccgaaccggtgacggtgtcgtggaactcaggcgccctgaccagcggcgtgcacaccttcccggctgtcctacagtcctcaggactctactccctcagcagcgtggtgaccgtgccctccagcagcttgggcacccagacctacatctgcaacgtgaatcacaagcccagcaacaccaaggtggacaagaaagttgagcccaaatcttgtgacaaaactcacacatgcccaccgtgcccagcacctgaactcctggggggaccgtcagtcttcctcttccccccaaaacccaaggacaccctcatgatctcccggacccctgaggtcacatgcgtggtggtggacgtgagccacgaagaccctgaggtcaagttcaactggtacgtggacggcgtggaggtgcataatgccaagacaaagccgcgggaggagcagtaccagagcacgtaccgtgtggtcagcgtcctcaccgtcctgcaccaggactggctgaatggcaaggagtacaagtgcaaggtctccaacaaagccctcccagcccccatcgagaaaaccatctccaaagccaaagggcagccccgagaaccacaggtgtacaccctgcccccatcccgggaggagatgaccaagaaccaggtcagcctgacctgcctggtcaaaggcttctatcccagcgacatcgccgtggagtgggagagcaatgggcagccggagaacaactacaagaccacgcctcccgtgctggactccgacggctccttcttcctctacagcaagctcaccgtggacaagagcaggtggcagcaggggaacgtcttctcatgctccgtgatgcatgaggctctgcacaaccactacacgcagaagagcctctccctgtctccgggtaaatga

SEQ ID NO: 454 - protein, 747 aa, Artificial Sequence
  Synthetic polypeptide
QGQSGQGYRWGCEWNCGGITTGSSGGSGGSGGLSGRSDNHGGGSQTVVTQEPSLTVSPGGTVTLTCRSSTGAVTTSNYANWVQQKPGQAPRGLIGGTNKRAPGTPARFSGSLLGGKAALTLSGVQPEDEAEYYCALWYSNLWVFGGGTKLTVLGGGGSGGGGSGGGGSEVQLVESGGGLVQPGGSLKLSCAASGFTFNTYAMNWVRQAPGKGLEWVARIRSKYNNYATYYADSVKDRFTISRDDSKNTAYLQMNNLKTEDTAVYYCVRHGNFGNSYVSWFAYWGQGTLVTVSSGGGGSQVQLKQSGPGLVQPSQSLSITCTVSGFSLTNYGVHWVRQSPGKGLEWLGVIWSGGNTDYNTPFTSRLSINKDNSKSQVFFKMNSLQSQDTAIYYCARALTYYDYEFAYWGQGTLVTVSAASTKGPSVFPLAPSSKSTSGGTAALGCLVKDYFPEPVTVSWNSGALTSGVHTFPAVLQSSGLYSLSSVVTVPSSSLGTQTYICNVNHKPSNTKVDKKVEPKSCDKTHTCPPCPAPELLGGPSVFLFPPKPKDTLMISRTPEVTCVVVDVSHEDPEVKFNWYVDGVEVHNAKTKPREEQYQSTYRVVSVLTVLHQDWLNGKEYKCKVSNKALPAPIEKTISKAKGQPREPQVYTLPPSREEMTKNQVSLTCLVKGFYPSDIAVEWESNGQPENNYKTTPPVLDSDGSFFLYSKLTVDKSRWQQGNVFSCSVMHEALHNHYTQKSLSLSPGK

SEQ ID NO: 455 - DNA, 1350 bp, Artificial Sequence
  Synthetic polynucleotide
caggtgcagctgaaacagagcggcccgggcctggtgcagccgagccagagcctgagcattacctgcaccgtgagcggctttagcctgaccaactatggcgtgcattgggtgcgccagagcccgggcaaaggcctggaatggctgggcgtgatttggagcggcggcaacaccgattataacaccccgtttaccagccgcctgagcattaacaaagataacagcaaaagccaggtgttttttaaaatgaacagcctgcaaagccaggataccgcgatttattattgcgcgcgcgcgctgacctattatgattatgaatttgcgtattggggccagggcaccctggtgaccgtgagcgcggctagcaccaagggcccatcggtcttccccctggcaccctcctccaagagcacctctgggggcacagcggccctgggctgcctggtcaaggactacttccccgaaccggtgacggtgtcgtggaactcaggcgccctgaccagcggcgtgcacaccttcccggctgtcctacagtcctcaggactctactccctcagcagcgtggtgaccgtgccctccagcagcttgggcacccagacctacatctgcaacgtgaatcacaagcccagcaacaccaaggtggacaagaaagttgagcccaaatcttgtgacaaaactcacacatgcccaccgtgcccagcacctgaactcctggggggaccgtcagtcttcctcttccccccaaaacccaaggacaccctcatgatctcccggacccctgaggtcacatgcgtggtggtggacgtgagccacgaagaccctgaggtcaagttcaactggtacgtggacggcgtggaggtgcataatgccaagacaaagccgcgggaggagcagtaccagagcacgtaccgtgtggtcagcgtcctcaccgtcctgcaccaggactggctgaatggcaaggagtacaagtgcaaggtctccaacaaagccctcccagcccccatcgagaaaaccatctccaaagccaaagggcagccccgagaaccacaggtgtacaccctgcccccatcccgggaggagatgaccaagaaccaggtcagcctgacctgcctggtcaaaggcttctatcccagcgacatcgccgtggagtgggagagcaatgggcagccggagaacaactacaagaccacgcctcccgtgctggactccgacggctccttcttcctctacagcaagctcaccgtggacaagagcaggtggcagcaggggaacgtcttctcatgctccgtgatgcatgaggctctgcacaaccactacacgcagaagagcctctccctgtctccgggtaaatga

SEQ ID NO: 456 - protein, 449 aa, Artificial Sequence
  Synthetic polypeptide
QVQLKQSGPGLVQPSQSLSITCTVSGFSLTNYGVHWVRQSPGKGLEWLGVIWSGGNTDYNTPFTSRLSINKDNSKSQVFFKMNSLQSQDTAIYYCARALTYYDYEFAYWGQGTLVTVSAASTKGPSVFPLAPSSKSTSGGTAALGCLVKDYFPEPVTVSWNSGALTSGVHTFPAVLQSSGLYSLSSVVTVPSSSLGTQTYICNVNHKPSNTKVDKKVEPKSCDKTHTCPPCPAPELLGGPSVFLFPPKPKDTLMISRTPEVTCVVVDVSHEDPEVKFNWYVDGVEVHNAKTKPREEQYQSTYRVVSVLTVLHQDWLNGKEYKCKVSNKALPAPIEKTISKAKGQPREPQVYTLPPSREEMTKNQVSLTCLVKGFYPSDIAVEWESNGQPENNYKTTPPVLDSDGSFFLYSKLTVDKSRWQQGNVFSCSVMHEALHNHYTQKSLSLSPGK

SEQ ID NO: 457 - DNA, 645 bp, Artificial Sequence
  Synthetic polynucleotide
gatatcttgctgacccagagcccggtgattctgagcgtgagcccgggcgaacgtgtgagctttagctgccgcgcgagccagagcattggcaccaacattcattggtatcagcagcgcaccaacggcagcccgcgcctgctgattaaatatgcgagcgaaagcattagcggcattccgagccgctttagcggcagcggcagcggcaccgattttaccctgagcattaacagcgtggaaagcgaagatattgcggattattattgccagcagaacaacaactggccgaccacctttggcgcgggcaccaaactggaaatcaaacgtacggtggctgcaccatctgtcttcatcttcccgccatctgatgagcagttgaaatctggaactgcctctgttgtgtgcctgctgaataacttctatcccagagaggccaaagtacagtggaaggtggataacgccctccaatcgggtaactcccaggagagtgtcacagagcaggacagcaaggacagcacctacagcctcagcagcaccctgacgctgagcaaagcagactacgagaaacacaaagtctacgcctgcgaagtcacccatcagggcctgagctcgcccgtcacaaagagcttcaacaggggagagtgttag

SEQ ID NO: 458 - protein, 214 aa, Artificial Sequence
  Synthetic polypeptide
DILLTQSPVILSVSPGERVSFSCRASQSIGTNIHWYQQRTNGSPRLLIKYASESISGIPSRFSGSGSGTDFTLSINSVESEDIADYYCQQNNNWPTTFGAGTKLEIKRTVAAPSVFIFPPSDEQLKSGTASVVCLLNNFYPREAKVQWKVDNALQSGNSQESVTEQDSKDSTYSLSSTLTLSKADYEKHKVYACEVTHQGLSSPVTKSFNRGEC

SEQ ID NO: 459 - DNA, 2112 bp, Artificial Sequence
  Synthetic polynucleotide
cagaccgtggtcacacaggagccctcactgacagtgagccctggcgggaccgtcacactgacttgtcgcagttcaactggcgccgtgactaccagcaattacgctaactgggtccagcagaaaccaggacaggcaccacgaggactgatcggaggaactaataagagagcaccaggaacccctgcaaggttctccggatctctgctggggggaaaagccgctctgacactgagcggcgtgcagcctgaggacgaagctgagtactattgcgcactgtggtactccaacctgtgggtgtttggcgggggaactaagctgaccgtcctgggaggaggaggaagcggaggaggagggagcggaggaggaggatccgaagtgcagctggtcgagagcggaggaggactggtgcagccaggaggatccctgaagctgtcttgtgcagccagtggcttcaccttcaacacttacgcaatgaactgggtgcggcaggcacctgggaagggactggaatgggtcgcccggatcagatctaaatacaataactatgccacctactatgctgacagtgtgaaggataggttcaccatttcacgcgacgatagcaaaaacacagcttatctgcagatgaataacctgaagaccgaggatacagcagtgtactattgcgtcagacacggcaatttcgggaactcttacgtgagttggtttgcctattggggacaggggacactggtcaccgtctcctcaggaggtggtggatcccaggtgcagctgaaacagagcggcccgggcctggtgcagccgagccagagcctgagcattacctgcaccgtgagcggctttagcctgaccaactatggcgtgcattgggtgcgccagagcccgggcaaaggcctggaatggctgggcgtgatttggagcggcggcaacaccgattataacaccccgtttaccagccgcctgagcattaacaaagataacagcaaaagccaggtgttttttaaaatgaacagcctgcaaagccaggataccgcgatttattattgcgcgcgcgcgctgacctattatgattatgaatttgcgtattggggccagggcaccctggtgaccgtgagcgcggctagcaccaagggcccatcggtcttccccctggcaccctcctccaagagcacctctgggggcacagcggccctgggctgcctggtcaaggactacttccccgaaccggtgacggtgtcgtggaactcaggcgccctgaccagcggcgtgcacaccttcccggctgtcctacagtcctcaggactctactccctcagcagcgtggtgaccgtgccctccagcagcttgggcacccagacctacatctgcaacgtgaatcacaagcccagcaacaccaaggtggacaagaaagttgagcccaaatcttgtgacaaaactcacacatgcccaccgtgcccagcacctgaactcctggggggaccgtcagtcttcctcttccccccaaaacccaaggacaccctcatgatctcccggacccctgaggtcacatgcgtggtggtggacgtgagccacgaagaccctgaggtcaagttcaactggtacgtggacggcgtggaggtgcataatgccaagacaaagccgcgggaggagcagtaccagagcacgtaccgtgtggtcagcgtcctcaccgtcctgcaccaggactggctgaatggcaaggagtacaagtgcaaggtctccaacaaagccctcccagcccccatcgagaaaaccatctccaaagccaaagggcagccccgagaaccacaggtgtacaccctgcccccatcccgggaggagatgaccaagaaccaggtcagcctgacctgcctggtcaaaggcttctatcccagcgacatcgccgtggagtgggagagcaatgggcagccggagaacaactacaagaccacgcctcccgtgctggactccgacggctccttcttcctctacagcaagctcaccgtggacaagagcaggtggcagcaggggaacgtcttctcatgctccgtgatgcatgaggctctgcacaaccactacacgcagaagagcctctccctgtctccgggtaaatga

SEQ ID NO: 460 - protein, 703 aa, Artificial Sequence
  Synthetic polypeptide
QTVVTQEPSLTVSPGGTVTLTCRSSTGAVTTSNYANWVQQKPGQAPRGLIGGTNKRAPGTPARFSGSLLGGKAALTLSGVQPEDEAEYYCALWYSNLWVFGGGTKLTVLGGGGSGGGGSGGGGSEVQLVESGGGLVQPGGSLKLSCAASGFTFNTYAMNWVRQAPGKGLEWVARIRSKYNNYATYYADSVKDRFTISRDDSKNTAYLQMNNLKTEDTAVYYCVRHGNFGNSYVSWFAYWGQGTLVTVSSGGGGSQVQLKQSGPGLVQPSQSLSITCTVSGFSLTNYGVHWVRQSPGKGLEWLGVIWSGGNTDYNTPFTSRLSINKDNSKSQVFFKMNSLQSQDTAIYYCARALTYYDYEFAYWGQGTLVTVSAASTKGPSVFPLAPSSKSTSGGTAALGCLVKDYFPEPVTVSWNSGALTSGVHTFPAVLQSSGLYSLSSVVTVPSSSLGTQTYICNVNHKPSNTKVDKKVEPKSCDKTHTCPPCPAPELLGGPSVFLFPPKPKDTLMISRTPEVTCVVVDVSHEDPEVKFNWYVDGVEVHNAKTKPREEQYQSTYRVVSVLTVLHQDWLNGKEYKCKVSNKALPAPIEKTISKAKGQPREPQVYTLPPSREEMTKNQVSLTCLVKGFYPSDIAVEWESNGQPENNYKTTPPVLDSDGSFFLYSKLTVDKSRWQQGNVFSCSVMHEALHNHYTQKSLSLSPGK

SEQ ID NO: 461 - DNA, 2244 bp, Artificial Sequence
  Synthetic polynucleotide
caaggccagtctggccaaggttatcggtggggttgcgagtggaattgcggtgggattactactggctcgagcggtggcagcggtggctctggtggtctgagcggccgttccgataatcatggcggcggttctgaggtgcagctggtcgagtctggaggaggattggtgcagcctggagggtcattgaaactctcatgtgcagcctctggattcaccttcaataagtacgccatgaactgggtccgccaggctccaggaaagggtttggaatgggttgctcgcataagaagtaaatataataattatgcaacatattatgccgattcagtgaaagacaggttcaccatctccagagatgattcaaaaaacactgcctatctacaaatgaacaacttgaaaactgaggacactgccgtgtactactgtgtgagacatgggaacttcggtaatagctacatatcctactgggcttactggggccaagggactctggtcaccgtctcctcaggtggtggtggttctggcggcggcggctccggtggtggtggttctcagactgttgtgactcaggaaccttcactcaccgtatcacctggtggaacagtcacactcacttgtggctcctcgactggggctgttacatctggctactacccaaactgggtccaacaaaaaccaggtcaggcaccccgtggtctaataggtgggactaagttcctcgcccccggtactcctgccagattctcaggctccctgcttggaggcaaggctgccctcaccctctcaggggtacagccagaggatgaggcagaatattactgtgctctatggtacagcaaccgctgggtgttcggtggaggaaccaaactgactgtcctaggaggtggtggatcccaggtgcagctgaaacagagcggcccgggcctggtgcagccgagccagagcctgagcattacctgcaccgtgagcggctttagcctgaccaactatggcgtgcattgggtgcgccagagcccgggcaaaggcctggaatggctgggcgtgatttggagcggcggcaacaccgattataacaccccgtttaccagccgcctgagcattaacaaagataacagcaaaagccaggtgttttttaaaatgaacagcctgcaaagccaggataccgcgatttattattgcgcgcgcgcgctgacctattatgattatgaatttgcgtattggggccagggcaccctggtgaccgtgagcgcggctagcaccaagggcccatcggtcttccccctggcaccctcctccaagagcacctctgggggcacagcggccctgggctgcctggtcaaggactacttccccgaaccggtgacggtgtcgtggaactcaggcgccctgaccagcggcgtgcacaccttcccggctgtcctacagtcctcaggactctactccctcagcagcgtggtgaccgtgccctccagcagcttgggcacccagacctacatctgcaacgtgaatcacaagcccagcaacaccaaggtggacaagaaagttgagcccaaatcttgtgacaaaactcacacatgcccaccgtgcccagcacctgaactcctggggggaccgtcagtcttcctcttccccccaaaacccaaggacaccctcatgatctcccggacccctgaggtcacatgcgtggtggtggacgtgagccacgaagaccctgaggtcaagttcaactggtacgtggacggcgtggaggtgcataatgccaagacaaagccgcgggaggagcagtaccagagcacgtaccgtgtggtcagcgtcctcaccgtcctgcaccaggactggctgaatggcaaggagtacaagtgcaaggtctccaacaaagccctcccagcccccatcgagaaaaccatctccaaagccaaagggcagccccgagaaccacaggtgtacaccctgcccccatcccgggaggagatgaccaagaaccaggtcagcctgacctgcctggtcaaaggcttctatcccagcgacatcgccgtggagtgggagagcaatgggcagccggagaacaactacaagaccacgcctcccgtgctggactccgacggctccttcttcctctacagcaagctcaccgtggacaagagcaggtggcagcaggggaacgtcttctcatgctccgtgatgcatgaggctctgcacaaccactacacgcagaagagcctctccctgtctccgggtaaatga

SEQ ID NO: 462 - protein, 747 aa, Artificial Sequence
  Synthetic polypeptide
QGQSGQGYRWGCEWNCGGITTGSSGGSGGSGGLSGRSDNHGGGSEVQLVESGGGLVQPGGSLKLSCAASGFTFNKYAMNWVRQAPGKGLEWVARIRSKYNNYATYYADSVKDRFTISRDDSKNTAYLQMNNLKTEDTAVYYCVRHGNFGNSYISYWAYWGQGTLVTVSSGGGGSGGGGSGGGGSQTVVTQEPSLTVSPGGTVTLTCGSSTGAVTSGYYPNWVQQKPGQAPRGLIGGTKFLAPGTPARFSGSLLGGKAALTLSGVQPEDEAEYYCALWYSNRWVFGGGTKLTVLGGGGSQVQLKQSGPGLVQPSQSLSITCTVSGFSLTNYGVHWVRQSPGKGLEWLGVIWSGGNTDYNTPFTSRLSINKDNSKSQVFFKMNSLQSQDTAIYYCARALTYYDYEFAYWGQGTLVTVSAASTKGPSVFPLAPSSKSTSGGTAALGCLVKDYFPEPVTVSWNSGALTSGVHTFPAVLQSSGLYSLSSVVTVPSSSLGTQTYICNVNHKPSNTKVDKKVEPKSCDKTHTCPPCPAPELLGGPSVFLFPPKPKDTLMISRTPEVTCVVVDVSHEDPEVKFNWYVDGVEVHNAKTKPREEQYQSTYRVVSVLTVLHQDWLNGKEYKCKVSNKALPAPIEKTISKAKGQPREPQVYTLPPSREEMTKNQVSLTCLVKGFYPSDIAVEWESNGQPENNYKTTPPVLDSDGSFFLYSKLTVDKSRWQQGNVFSCSVMHEALHNHYTQKSLSLSPGK

SEQ ID NO: 463 - DNA, 2244 bp, Artificial Sequence
  Synthetic polynucleotide
caaggccagtctggccaaatgatgtattgcggtgggaatgaggtgttgtgcgggccgcgggttggctcgagcggtggcagcggtggctctggtggtctgagcggccgttccgataatcatggcggcggttctgaggtgcagctggtcgagtctggaggaggattggtgcagcctggagggtcattgaaactctcatgtgcagcctctggattcaccttcaataagtacgccatgaactgggtccgccaggctccaggaaagggtttggaatgggttgctcgcataagaagtaaatataataattatgcaacatattatgccgattcagtgaaagacaggttcaccatctccagagatgattcaaaaaacactgcctatctacaaatgaacaacttgaaaactgaggacactgccgtgtactactgtgtgagacatgggaacttcggtaatagctacatatcctactgggcttactggggccaagggactctggtcaccgtctcctcaggtggtggtggttctggcggcggcggctccggtggtggtggttctcagactgttgtgactcaggaaccttcactcaccgtatcacctggtggaacagtcacactcacttgtggctcctcgactggggctgttacatctggctactacccaaactgggtccaacaaaaaccaggtcaggcaccccgtggtctaataggtgggactaagttcctcgcccccggtactcctgccagattctcaggctccctgcttggaggcaaggctgccctcaccctctcaggggtacagccagaggatgaggcagaatattactgtgctctatggtacagcaaccgctgggtgttcggtggaggaaccaaactgactgtcctaggaggtggtggatcccaggtgcagctgaaacagagcggcccgggcctggtgcagccgagccagagcctgagcattacctgcaccgtgagcggctttagcctgaccaactatggcgtgcattgggtgcgccagagcccgggcaaaggcctggaatggctgggcgtgatttggagcggcggcaacaccgattataacaccccgtttaccagccgcctgagcattaacaaagataacagcaaaagccaggtgttttttaaaatgaacagcctgcaaagccaggataccgcgatttattattgcgcgcgcgcgctgacctattatgattatgaatttgcgtattggggccagggcaccctggtgaccgtgagcgcggctagcaccaagggcccatcggtcttccccctggcaccctcctccaagagcacctctgggggcacagcggccctgggctgcctggtcaaggactacttccccgaaccggtgacggtgtcgtggaactcaggcgccctgaccagcggcgtgcacaccttcccggctgtcctacagtcctcaggactctactccctcagcagcgtggtgaccgtgccctccagcagcttgggcacccagacctacatctgcaacgtgaatcacaagcccagcaacaccaaggtggacaagaaagttgagcccaaatcttgtgacaaaactcacacatgcccaccgtgcccagcacctgaactcctggggggaccgtcagtcttcctcttccccccaaaacccaaggacaccctcatgatctcccggacccctgaggtcacatgcgtggtggtggacgtgagccacgaagaccctgaggtcaagttcaactggtacgtggacggcgtggaggtgcataatgccaagacaaagccgcgggaggagcagtaccagagcacgtaccgtgtggtcagcgtcctcaccgtcctgcaccaggactggctgaatggcaaggagtacaagtgcaaggtctccaacaaagccctcccagcccccatcgagaaaaccatctccaaagccaaagggcagccccgagaaccacaggtgtacaccctgcccccatcccgggaggagatgaccaagaaccaggtcagcctgacctgcctggtcaaaggcttctatcccagcgacatcgccgtggagtgggagagcaatgggcagccggagaacaactacaagaccacgcctcccgtgctggactccgacggctccttcttcctctacagcaagctcaccgtggacaagagcaggtggcagcaggggaacgtcttctcatgctccgtgatgcatgaggctctgcacaaccactacacgcagaagagcctctccctgtctccgggtaaatga

SEQ ID NO: 464 - protein, 747 aa, Artificial Sequence
  Synthetic polypeptide
QGQSGQMMYCGGNEVLCGPRVGSSGGSGGSGGLSGRSDNHGGGSEVQLVESGGGLVQPGGSLKLSCAASGFTFNKYAMNWVRQAPGKGLEWVARIRSKYNNYATYYADSVKDRFTISRDDSKNTAYLQMNNLKTEDTAVYYCVRHGNFGNSYISYWAYWGQGTLVTVSSGGGGSGGGGSGGGGSQTVVTQEPSLTVSPGGTVTLTCGSSTGAVTSGYYPNWVQQKPGQAPRGLIGGTKFLAPGTPARFSGSLLGGKAALTLSGVQPEDEAEYYCALWYSNRWVFGGGTKLTVLGGGGSQVQLKQSGPGLVQPSQSLSITCTVSGFSLTNYGVHWVRQSPGKGLEWLGVIWSGGNTDYNTPFTSRLSINKDNSKSQVFFKMNSLQSQDTAIYYCARALTYYDYEFAYWGQGTLVTVSAASTKGPSVFPLAPSSKSTSGGTAALGCLVKDYFPEPVTVSWNSGALTSGVHTFPAVLQSSGLYSLSSVVTVPSSSLGTQTYICNVNHKPSNTKVDKKVEPKSCDKTHTCPPCPAPELLGGPSVFLFPPKPKDTLMISRTPEVTCVVVDVSHEDPEVKFNWYVDGVEVHNAKTKPREEQYQSTYRVVSVLTVLHQDWLNGKEYKCKVSNKALPAPIEKTISKAKGQPREPQVYTLPPSREEMTKNQVSLTCLVKGFYPSDIAVEWESNGQPENNYKTTPPVLDSDGSFFLYSKLTVDKSRWQQGNVFSCSVMHEALHNHYTQKSLSLSPGK

SEQ ID NO: 465 - DNA, 1350 bp, Artificial Sequence
  Synthetic polynucleotide
caggtgcagctgcaggagtccggaccaggactggtccggccctcacagactctgagcctgacatgcactgtgtcaggctacagcatcacctccgatcacgcctggagctgggtcaggcagccacctggacgcggcctggaatggatcggctacatttcttatagtgggatcaccacatacaacccctctctgaagagtcgagtgaccatttccagagacaactctaaaaatacactgtatctgcagatgaatagtctgcgggccgaggatacagctgtgtactattgtgcacggtctctggccagaactaccgctatggactattgggggcagggaagcctggtgaccgtcagctccgctagcaccaagggcccatcggtcttccccctggcaccctcctccaagagcacctctgggggcacagcggccctgggctgcctggtcaaggactacttccccgaaccggtgacggtgtcgtggaactcaggcgccctgaccagcggcgtgcacaccttcccggctgtcctacagtcctcaggactctactccctcagcagcgtggtgaccgtgccctccagcagcttgggcacccagacctacatctgcaacgtgaatcacaagcccagcaacaccaaggtggacaagaaagttgagcccaaatcttgtgacaaaactcacacatgcccaccgtgcccagcacctgaactcctggggggaccgtcagtcttcctcttccccccaaaacccaaggacaccctcatgatctcccggacccctgaggtcacatgcgtggtggtggacgtgagccacgaagaccctgaggtcaagttcaactggtacgtggacggcgtggaggtgcataatgccaagacaaagccgcgggaggagcagtaccagagcacgtaccgtgtggtcagcgtcctcaccgtcctgcaccaggactggctgaatggcaaggagtacaagtgcaaggtctccaacaaagccctcccagcccccatcgagaaaaccatctccaaagccaaagggcagccccgagaaccacaggtgtacaccctgcccccatcccgggaggagatgaccaagaaccaggtcagcctgacctgcctggtcaaaggcttctatcccagcgacatcgccgtggagtgggagagcaatgggcagccggagaacaactacaagaccacgcctcccgtgctggactccgacggctccttcttcctctacagcaagctcaccgtggacaagagcaggtggcagcaggggaacgtcttctcatgctccgtgatgcatgaggctctgcacaaccactacacgcagaagagcctctccctgtctccgggtaaatga

SEQ ID NO: 466 - protein, 449 aa, Artificial Sequence
  Synthetic polypeptide
QVQLQESGPGLVRPSQTLSLTCTVSGYSITSDHAWSWVRQPPGRGLEWIGYISYSGITTYNPSLKSRVTISRDNSKNTLYLQMNSLRAEDTAVYYCARSLARTTAMDYWGQGSLVTVSSASTKGPSVFPLAPSSKSTSGGTAALGCLVKDYFPEPVTVSWNSGALTSGVHTFPAVLQSSGLYSLSSVVTVPSSSLGTQTYICNVNHKPSNTKVDKKVEPKSCDKTHTCPPCPAPELLGGPSVFLFPPKPKDTLMISRTPEVTCVVVDVSHEDPEVKFNWYVDGVEVHNAKTKPREEQYQSTYRVVSVLTVLHQDWLNGKEYKCKVSNKALPAPIEKTISKAKGQPREPQVYTLPPSREEMTKNQVSLTCLVKGFYPSDIAVEWESNGQPENNYKTTPPVLDSDGSFFLYSKLTVDKSRWQQGNVFSCSVMHEALHNHYTQKSLSLSPGK

SEQ ID NO: 467 - DNA, 645 bp, Artificial Sequence
  Synthetic polynucleotide
gacatccagatgactcagtctcctagctccctgtccgcctctgtgggggaccgagtcaccatcacatgcagagccagccaggatatttctagttacctgaactggtatcagcagaagcccggaaaagcacctaagctgctgatctactatacctccaggctgcactctggcgtgcccagtcggttcagtggctcagggagcggaaccgacttcacttttaccatctcaagcctgcagccagaggatattgccacatactattgtcagcagggcaatacactgccctacacttttggccaggggaccaaggtggaaatcaaacgtacggtggctgcaccatctgtcttcatcttcccgccatctgatgagcagttgaaatctggaactgcctctgttgtgtgcctgctgaataacttctatcccagagaggccaaagtacagtggaaggtggataacgccctccaatcgggtaactcccaggagagtgtcacagagcaggacagcaaggacagcacctacagcctcagcagcaccctgacgctgagcaaagcagactacgagaaacacaaagtctacgcctgcgaagtcacccatcagggcctgagctcgcccgtcacaaagagcttcaacaggggagagtgttag

SEQ ID NO: 468 - protein, 214 aa, Artificial Sequence [sequence omitted]

SEQ ID NO: 469 - DNA, 2112 bp, Artificial Sequence
  Synthetic polynucleotide
cagaccgtggtcacacaggagccctcactgacagtgagccctggcgggaccgtcacactgacttgtcgcagttcaactggcgccgtgactaccagcaattacgctaactgggtccagcagaaaccaggacaggcaccacgaggactgatcggaggaactaataagagagcaccaggaacccctgcaaggttctccggatctctgctggggggaaaagccgctctgacactgagcggcgtgcagcctgaggacgaagctgagtactattgcgcactgtggtactccaacctgtgggtgtttggcgggggaactaagctgaccgtcctgggaggaggaggaagcggaggaggagggagcggaggaggaggatccgaagtgcagctggtcgagagcggaggaggactggtgcagccaggaggatccctgaagctgtcttgtgcagccagtggcttcaccttcaacacttacgcaatgaactgggtgcggcaggcacctgggaagggactggaatgggtcgcccggatcagatctaaatacaataactatgccacctactatgctgacagtgtgaaggataggttcaccatttcacgcgacgatagcaaaaacacagcttatctgcagatgaataacctgaagaccgaggatacagcagtgtactattgcgtcagacacggcaatttcgggaactcttacgtgagttggtttgcctattggggacaggggacactggtcaccgtctcctcaggaggtggtggatcccaggtgcagctgcaggagtccggaccaggactggtccggccctcacagactctgagcctgacatgcactgtgtcaggctacagcatcacctccgatcacgcctggagctgggtcaggcagccacctggacgcggcctggaatggatcggctacatttcttatagtgggatcaccacatacaacccctctctgaagagtcgagtgaccatttccagagacaactctaaaaatacactgtatctgcagatgaatagtctgcgggccgaggatacagctgtgtactattgtgcacggtctctggccagaactaccgctatggactattgggggcagggaagcctggtgaccgtcagctccgctagcaccaagggcccatcggtcttccccctggcaccctcctccaagagcacctctgggggcacagcggccctgggctgcctggtcaaggactacttccccgaaccggtgacggtgtcgtggaactcaggcgccctgaccagcggcgtgcacaccttcccggctgtcctacagtcctcaggactctactccctcagcagcgtggtgaccgtgccctccagcagcttgggcacccagacctacatctgcaacgtgaatcacaagcccagcaacaccaaggtggacaagaaagttgagcccaaatcttgtgacaaaactcacacatgcccaccgtgcccagcacctgaactcctggggggaccgtcagtcttcctcttccccccaaaacccaaggacaccctcatgatctcccggacccctgaggtcacatgcgtggtggtggacgtgagccacgaagaccctgaggtcaagttcaactggtacgtggacggcgtggaggtgcataatgccaagacaaagccgcgggaggagcagtaccagagcacgtaccgtgtggtcagcgtcctcaccgtcctgcaccaggactggctgaatggcaaggagtacaagtgcaaggtctccaacaaagccctcccagcccccatcgagaaaaccatctccaaagccaaagggcagccccgagaaccacaggtgtacaccctgcccccatcccgggaggagatgaccaagaaccaggtcagcctgacctgcctggtcaaaggcttctatcccagcgacatcgccgtggagtgggagagcaatgggcagccggagaacaactacaagaccacgcctcccgtgctggactccgacggctccttcttcctctacagcaagctcaccgtggacaagagcaggtggcagcaggggaacgtcttctcatgctccgtgatgcatgaggctctgcacaaccactacacgcagaagagcctctccctgtctccgggtaaatga

SEQ ID NO: 470 - protein, 703 aa, Artificial Sequence
  Synthetic polypeptide
QTVVTQEPSLTVSPGGTVTLTCRSSTGAVTTSNYANWVQQKPGQAPRGLIGGTNKRAPGTPARFSGSLLGGKAALTLSGVQPEDEAEYYCALWYSNLWVFGGGTKLTVLGGGGSGGGGSGGGGSEVQLVESGGGLVQPGGSLKLSCAASGFTFNTYAMNWVRQAPGKGLEWVARIRSKYNNYATYYADSVKDRFTISRDDSKNTAYLQMNNLKTEDTAVYYCVRHGNFGNSYVSWFAYWGQGTLVTVSSGGGGSQVQLQESGPGLVRPSQTLSLTCTVSGYSITSDHAWSWVRQPPGRGLEWIGYISYSGITTYNPSLKSRVTISRDNSKNTLYLQMNSLRAEDTAVYYCARSLARTTAMDYWGQGSLVTVSSASTKGPSVFPLAPSSKSTSGGTAALGCLVKDYFPEPVTVSWNSGALTSGVHTFPAVLQSSGLYSLSSVVTVPSSSLGTQTYICNVNHKPSNTKVDKKVEPKSCDKTHTCPPCPAPELLGGPSVFLFPPKPKDTLMISRTPEVTCVVVDVSHEDPEVKFNWYVDGVEVHNAKTKPREEQYQSTYRVVSVLTVLHQDWLNGKEYKCKVSNKALPAPIEKTISKAKGQPREPQVYTLPPSREEMTKNQVSLTCLVKGFYPSDIAVEWESNGQPENNYKTTPPVLDSDGSFFLYSKLTVDKSRWQQGNVFSCSVMHEALHNHYTQKSLSLSPGK

SEQ ID NO: 471 - DNA, 2244 bp, Artificial Sequence
  Synthetic polynucleotide
caaggccagtctggccaaatgatgtattgcggtgggaatgaggtgttgtgcgggccgcgggttggctcgagcggtggcagcggtggctctggtggtctgagcggccgttccgataatcatggcggcggttctcagaccgtggtcacacaggagccctcactgacagtgagccctggcgggaccgtcacactgacttgtcgcagttcaactggcgccgtgactaccagcaattacgctaactgggtccagcagaaaccaggacaggcaccacgaggactgatcggaggaactaataagagagcaccaggaacccctgcaaggttctccggatctctgctggggggaaaagccgctctgacactgagcggcgtgcagcctgaggacgaagctgagtactattgcgcactgtggtactccaacctgtgggtgtttggcgggggaactaagctgaccgtcctgggaggaggaggaagcggaggaggagggagcggaggaggaggatccgaagtgcagctggtcgagagcggaggaggactggtgcagccaggaggatccctgaagctgtcttgtgcagccagtggcttcaccttcaacacttacgcaatgaactgggtgcggcaggcacctgggaagggactggaatgggtcgcccggatcagatctaaatacaataactatgccacctactatgctgacagtgtgaaggataggttcaccatttcacgcgacgatagcaaaaacacagcttatctgcagatgaataacctgaagaccgaggatacagcagtgtactattgcgtcagacacggcaatttcgggaactcttacgtgagttggtttgcctattggggacaggggacactggtcaccgtctcctcaggaggtggtggatcccaggtgcagctgcaggagtccggaccaggactggtccggccctcacagactctgagcctgacatgcactgtgtcaggctacagcatcacctccgatcacgcctggagctgggtcaggcagccacctggacgcggcctggaatggatcggctacatttcttatagtgggatcaccacatacaacccctctctgaagagtcgagtgaccatttccagagacaactctaaaaatacactgtatctgcagatgaatagtctgcgggccgaggatacagctgtgtactattgtgcacggtctctggccagaactaccgctatggactattgggggcagggaagcctggtgaccgtcagctccgctagcaccaagggcccatcggtcttccccctggcaccctcctccaagagcacctctgggggcacagcggccctgggctgcctggtcaaggactacttccccgaaccggtgacggtgtcgtggaactcaggcgccctgaccagcggcgtgcacaccttcccggctgtcctacagtcctcaggactctactccctcagcagcgtggtgaccgtgccctccagcagcttgggcacccagacctacatctgcaacgtgaatcacaagcccagcaacaccaaggtggacaagaaagttgagcccaaatcttgtgacaaaactcacacatgcccaccgtgcccagcacctgaactcctggggggaccgtcagtcttcctcttccccccaaaacccaaggacaccctcatgatctcccggacccctgaggtcacatgcgtggtggtggacgtgagccacgaagaccctgaggtcaagttcaactggtacgtggacggcgtggaggtgcataatgccaagacaaagccgcgggaggagcagtaccagagcacgtaccgtgtggtcagcgtcctcaccgtcctgcaccaggactggctgaatggcaaggagtacaagtgcaaggtctccaacaaagccctcccagcccccatcgagaaaaccatctccaaagccaaagggcagccccgagaaccacaggtgtacaccctgcccccatcccgggaggagatgaccaagaaccaggtcagcctgacctgcctggtcaaaggcttctatcccagcgacatcgccgtggagtgggagagcaatgggcagccggagaacaactacaagaccacgcctcccgtgctggactccgacggctccttcttcctctacagcaagctcaccgtggacaagagcaggtggcagcaggggaacgtcttctcatgctccgtgatgcatgaggctctgcacaaccactacacgcagaagagcctctccctgtctccgggtaaatga

SEQ ID NO: 472 - protein, 747 aa, Artificial Sequence
  Synthetic polypeptide
QGQSGQMMYCGGNEVLCGPRVGSSGGSGGSGGLSGRSDNHGGGSQTVVTQEPSLTVSPGGTVTLTCRSSTGAVTTSNYANWVQQKPGQAPRGLIGGTNKRAPGTPARFSGSLLGGKAALTLSGVQPEDEAEYYCALWYSNLWVFGGGTKLTVLGGGGSGGGGSGGGGSEVQLVESGGGLVQPGGSLKLSCAASGFTFNTYAMNWVRQAPGKGLEWVARIRSKYNNYATYYADSVKDRFTISRDDSKNTAYLQMNNLKTEDTAVYYCVRHGNFGNSYVSWFAYWGQGTLVTVSSGGGGSQVQLQESGPGLVRPSQTLSLTCTVSGYSITSDHAWSWVRQPPGRGLEWIGYISYSGITTYNPSLKSRVTISRDNSKNTLYLQMNSLRAEDTAVYYCARSLARTTAMDYWGQGSLVTVSSASTKGPSVFPLAPSSKSTSGGTAALGCLVKDYFPEPVTVSWNSGALTSGVHTFPAVLQSSGLYSLSSVVTVPSSSLGTQTYICNVNHKPSNTKVDKKVEPKSCDKTHTCPPCPAPELLGGPSVFLFPPKPKDTLMISRTPEVTCVVVDVSHEDPEVKFNWYVDGVEVHNAKTKPREEQYQSTYRVVSVLTVLHQDWLNGKEYKCKVSNKALPAPIEKTISKAKGQPREPQVYTLPPSREEMTKNQVSLTCLVKGFYPSDIAVEWESNGQPENNYKTTPPVLDSDGSFFLYSKLTVDKSRWQQGNVFSCSVMHEALHNHYTQKSLSLSPGK

SEQ ID NO: 473 - DNA, 777 bp, Artificial Sequence
  Synthetic polynucleotide
caaggccagtctggccagtatgggtcctgcagttggaactatgtacacatattcatggattgcggctcgagcggtggcagcggtggctctggtggtctgagcggccgttccgataatcatggcggcggttctgacatccagatgactcagtctcctagctccctgtccgcctctgtgggggaccgagtcaccatcacatgcagagccagccaggatatttctagttacctgaactggtatcagcagaagcccggaaaagcacctaagctgctgatctactatacctccaggctgcactctggcgtgcccagtcggttcagtggctcagggagcggaaccgacttcacttttaccatctcaagcctgcagccagaggatattgccacatactattgtcagcagggcaatacactgccctacacttttggccaggggaccaaggtggaaatcaaacgtacggtggctgcaccatctgtcttcatcttcccgccatctgatgagcagttgaaatctggaactgcctctgttgtgtgcctgctgaataacttctatcccagagaggccaaagtacagtggaaggtggataacgccctccaatcgggtaactcccaggagagtgtcacagagcaggacagcaaggacagcacctacagcctcagcagcaccctgacgctgagcaaagcagactacgagaaacacaaagtctacgcctgcgaagtcacccatcagggcctgagctcgcccgtcacaaagagcttcaacaggggagagtgttag

SEQ ID NO: 474 - protein, 258 aa, Artificial Sequence
  Synthetic polypeptide
QGQSGQYGSCSWNYVHIFMDCGSSGGSGGSGGLSGRSDNHGGGSDIQMTQSPSSLSASVGDRVTITCRASQDISSYLNWYQQKPGKAPKLLIYYTSRLHSGVPSRFSGSGSGTDFTFTISSLQPEDIATYYCQQGNTLPYTFGQGTKVEIKRTVAAPSVFIFPPSDEQLKSGTASVVCLLNNFYPREAKVQWKVDNALQSGNSQESVTEQDSKDSTYSLSSTLTLSKADYEKHKVYACEVTHQGLSSPVTKSFNRGEC

SEQ ID NO: 475 - DNA, 2253 bp, Artificial Sequence
  Synthetic polynucleotide
caaggccagtctggccaatggacgtgcggaggtatggtgtatcttgcgggattctgcatggcgggaggtggctcgagcggtggcagcggtggctctggtggtattagcagtggtctgttaagcggtcgtagcgataatcatggcggcggttctgaagtgcagctggtggaatctgggggcggactggtgcagcctggcaagtctctgaagctgagctgcgaggccagcggcttcacctttagcggctacggcatgcactgggtgcgccaggcacctggcagaggcctggaaagcgtggcctacatcaccagcagcagcatcaacattaagtacgccgacgccgtgaagggccggttcaccgtgtccagagacaacgccaagaacctgctgttcctgcagatgaacatcctgaagtccgaggacaccgccatgtactactgcgccagattcgactgggacaagaactactggggccagggcacaatggtcacagtgtccagcggtggaggtggtagtggtggaggaagtggaggttcaggaggtggaagcggtggtggtggtagtgacatccagatgacccagagccccagcagcctgcctgcctctctgggcgatagagtgaccatcaactgccaggccagccaggacatcagcaactacctgaactggtatcagcagaagcccggcaaggcccccaagctgctgatctactacaccaacaagctggccgacggtgtgcccagcagattcagcggcagcggtagcggcagagacagcagcttcaccatcagctccctggaatccgaggatatcggcagctactactgccagcagtactacaactacccctggaccttcggccctggcaccaagctggaaatcaaaagaggaggtggtggatcccaggtgcagctgaaacagagcggcccgggcctggtgcagccgagccagagcctgagcattacctgcaccgtgagcggctttagcctgaccaactatggcgtgcattgggtgcgccagagcccgggcaaaggcctggaatggctgggcgtgatttggagcggcggcaacaccgattataacaccccgtttaccagccgcctgagcattaacaaagataacagcaaaagccaggtgttttttaaaatgaacagcctgcaaagccaggataccgcgatttattattgcgcgcgcgcgctgacctattatgattatgaatttgcgtattggggccagggcaccctggtgaccgtgagcgcggctagcaccaagggcccatcggtcttccccctggcaccctcctccaagagcacctctgggggcacagcggccctgggctgcctggtcaaggactacttccccgaaccggtgacggtgtcgtggaactcaggcgccctgaccagcggcgtgcacaccttcccggctgtcctacagtcctcaggactctactccctcagcagcgtggtgaccgtgccctccagcagcttgggcacccagacctacatctgcaacgtgaatcacaagcccagcaacaccaaggtggacaagaaagttgagcccaaatcttgtgacaaaactcacacatgcccaccgtgcccagcacctgaactcctggggggaccgtcagtcttcctcttccccccaaaacccaaggacaccctcatgatctcccggacccctgaggtcacatgcgtggtggtggacgtgagccacgaagaccctgaggtcaagttcaactggtacgtggacggcgtggaggtgcataatgccaagacaaagccgcgggaggagcagtaccagagcacgtaccgtgtggtcagcgtcctcaccgtcctgcaccaggactggctgaatggcaaggagtacaagtgcaaggtctccaacaaagccctcccagcccccatcgagaaaaccatctccaaagccaaagggcagccccgagaaccacaggtgtacaccctgcccccatcccgggaggagatgaccaagaaccaggtcagcctgacctgcctggtcaaaggcttctatcccagcgacatcgccgtggagtgggagagcaatgggcagccggagaacaactacaagaccacgcctcccgtgctggactccgacggctccttcttcctctacagcaagctcaccgtggacaagagcaggtggcagcaggggaacgtcttctcatgctccgtgatgcatgaggctctgcacaaccactacacgcagaagagcctctccctgtctccgggtaaatga

SEQ ID NO: 476 - protein, 750 aa, Artificial Sequence
  Synthetic polypeptide
QGQSGQWTCGGMVYLAGFCMAGGGSSGGSGGSGGISSGLLSGRSDNHGGGSEVQLVESGGGLVQPGKSLKLSCEASGFTFSGYGMHWVRQAPGRGLESVAYITSSSINIKYADAVKGRFTVSRDNAKNLLFLQMNILKSEDTAMYYCARFDWDKNYWGQGTMVTVSSGGGGSGGGSGGSGGGSGGGGSDIQMTQSPSSLPASLGDRVTINCQASQDISNYLNWYQQKPGKAPKLLIYYTNKLADGVPSRFSGSGSGRDSSFTISSLESEDIGSYYCQQYYNYPWTFGPGTKLEIKRGGGGSQVQLKQSGPGLVQPSQSLSITCTVSGFSLTNYGVHWVRQSPGKGLEWLGVIWSGGNTDYNTPFTSRLSINKDNSKSQVFFKMNSLQSQDTAIYYCARALTYYDYEFAYWGQGTLVTVSAASTKGPSVFPLAPSSKSTSGGTAALGCLVKDYFPEPVTVSWNSGALTSGVHTFPAVLQSSGLYSLSSVVTVPSSSLGTQTYICNVNHKPSNTKVDKKVEPKSCDKTHTCPPCPAPELLGGPSVFLFPPKPKDTLMISRTPEVTCVVVDVSHEDPEVKFNWYVDGVEVHNAKTKPREEQYQSTYRVVSVLTVLHQDWLNGKEYKCKVSNKALPAPIEKTISKAKGQPREPQVYTLPPSREEMTKNQVSLTCLVKGFYPSDIAVEWESNGQPENNYKTTPPVLDSDGSFFLYSKLTVDKSRWQQGNVFSCSVMHEALHNHYTQKSLSLSPGK

SEQ ID NO: 477 - DNA, 2244 bp, Artificial Sequence
  Synthetic polynucleotide
caaggccagtctggccaaatgatgtattgcggtgggaatgaggtgttgtgcgggccgcgggttggctcgagcggtggcagcggtggctctggtggtggtggaggctcgggcggtgggagcggcggcggttctcagaccgtggtcacacaggagccctcactgacagtgagccctggcgggaccgtcacactgacttgtcgcagttcaactggcgccgtgactaccagcaattacgctaactgggtccagcagaaaccaggacaggcaccacgaggactgatcggaggaactaataagagagcaccaggaacccctgcaaggttctccggatctctgctggggggaaaagccgctctgacactgagcggcgtgcagcctgaggacgaagctgagtactattgcgcactgtggtactccaacctgtgggtgtttggcgggggaactaagctgaccgtcctgggaggaggaggaagcggaggaggagggagcggaggaggaggatccgaagtgcagctggtcgagagcggaggaggactggtgcagccaggaggatccctgaagctgtcttgtgcagccagtggcttcaccttcaacacttacgcaatgaactgggtgcggcaggcacctgggaagggactggaatgggtcgcccggatcagatctaaatacaataactatgccacctactatgctgacagtgtgaaggataggttcaccatttcacgcgacgatagcaaaaacacagcttatctgcagatgaataacctgaagaccgaggatacagcagtgtactattgcgtcagacacggcaatttcgggaactcttacgtgagttggtttgcctattggggacaggggacactggtcaccgtctcctcaggaggtggtggatcccaggtgcagctgcaggagtccggaccaggactggtccggccctcacagactctgagcctgacatgcactgtgtcaggctacagcatcacctccgatcacgcctggagctgggtcaggcagccacctggacgcggcctggaatggatcggctacatttcttatagtgggatcaccacatacaacccctctctgaagagtcgagtgaccatttccagagacaactctaaaaatacactgtatctgcagatgaatagtctgcgggccgaggatacagctgtgtactattgtgcacggtctctggccagaactaccgctatggactattgggggcagggaagcctggtgaccgtcagctccgctagcaccaagggcccatcggtcttccccctggcaccctcctccaagagcacctctgggggcacagcggccctgggctgcctggtcaaggactacttccccgaaccggtgacggtgtcgtggaactcaggcgccctgaccagcggcgtgcacaccttcccggctgtcctacagtcctcaggactctactccctcagcagcgtggtgaccgtgccctccagcagcttgggcacccagacctacatctgcaacgtgaatcacaagcccagcaacaccaaggtggacaagaaagttgagcccaaatcttgtgacaaaactcacacatgcccaccgtgcccagcacctgaactcctggggggaccgtcagtcttcctcttccccccaaaacccaaggacaccctcatgatctcccggacccctgaggtcacatgcgtggtggtggacgtgagccacgaagaccctgaggtcaagttcaactggtacgtggacggcgtggaggtgcataatgccaagacaaagccgcgggaggagcagtaccagagcacgtaccgtgtggtcagcgtcctcaccgtcctgcaccaggactggctgaatggcaaggagtacaagtgcaaggtctccaacaaagccctcccagcccccatcgagaaaaccatctccaaagccaaagggcagccccgagaaccacaggtgtacaccctgcccccatcccgggaggagatgaccaagaaccaggtcagcctgacctgcctggtcaaaggcttctatcccagcgacatcgccgtggagtgggagagcaatgggcagccggagaacaactacaagaccacgcctcccgtgctggactccgacggctccttcttcctctacagcaagctcaccgtggacaagagcaggtggcagcaggggaacgtcttctcatgctccgtgatgcatgaggctctgcacaaccactacacgcagaagagcctctccctgtctccgggtaaatga

SEQ ID NO: 478 - protein, 747 aa, Artificial Sequence
  Synthetic polypeptide
QGQSGQMMYCGGNEVLCGPRVGSSGGSGGSGGGGGSGGGSGGGSQTVVTQEPSLTVSPGGTVTLTCRSSTGAVTTSNYANWVQQKPGQAPRGLIGGTNKRAPGTPARFSGSLLGGKAALTLSGVQPEDEAEYYCALWYSNLWVFGGGTKLTVLGGGGSGGGGSGGGGSEVQLVESGGGLVQPGGSLKLSCAASGFTFNTYAMNWVRQAPGKGLEWVARIRSKYNNYATYYADSVKDRFTISRDDSKNTAYLQMNNLKTEDTAVYYCVRHGNFGNSYVSWFAYWGQGTLVTVSSGGGGSQVQLQESGPGLVRPSQTLSLTCTVSGYSITSDHAWSWVRQPPGRGLEWIGYISYSGITTYNPSLKSRVTISRDNSKNTLYLQMNSLRAEDTAVYYCARSLARTTAMDYWGQGSLVTVSSASTKGPSVFPLAPSSKSTSGGTAALGCLVKDYFPEPVTVSWNSGALTSGVHTFPAVLQSSGLYSLSSVVTVPSSSLGTQTYICNVNHKPSNTKVDKKVEPKSCDKTHTCPPCPAPELLGGPSVFLFPPKPKDTLMISRTPEVTCVVVDVSHEDPEVKFNWYVDGVEVHNAKTKPREEQYQSTYRVVSVLTVLHQDWLNGKEYKCKVSNKALPAPIEKTISKAKGQPREPQVYTLPPSREEMTKNQVSLTCLVKGFYPSDIAVEWESNGQPENNYKTTPPVLDSDGSFFLYSKLTVDKSRWQQGNVFSCSVMHEALHNHYTQKSLSLSPGK

SEQ ID NO: 479 - DNA, 2259 bp, Artificial Sequence
  Synthetic polynucleotide
caaggccagtctggccaaatgatgtattgcggtgggaatgaggtgttgtgcgggccgcgggttggctcgagcggtggcagcggtggctctggtggtatctcttccggactgctgtccggcagatccgacaatcacggcggcggttctcagaccgtggtcacacaggagccctcactgacagtgagccctggcgggaccgtcacactgacttgtcgcagttcaactggcgccgtgactaccagcaattacgctaactgggtccagcagaaaccaggacaggcaccacgaggactgatcggaggaactaataagagagcaccaggaacccctgcaaggttctccggatctctgctggggggaaaagccgctctgacactgagcggcgtgcagcctgaggacgaagctgagtactattgcgcactgtggtactccaacctgtgggtgtttggcgggggaactaagctgaccgtcctgggaggaggaggaagcggaggaggagggagcggaggaggaggatccgaagtgcagctggtcgagagcggaggaggactggtgcagccaggaggatccctgaagctgtcttgtgcagccagtggcttcaccttcaacacttacgcaatgaactgggtgcggcaggcacctgggaagggactggaatgggtcgcccggatcagatctaaatacaataactatgccacctactatgctgacagtgtgaaggataggttcaccatttcacgcgacgatagcaaaaacacagcttatctgcagatgaataacctgaagaccgaggatacagcagtgtactattgcgtcagacacggcaatttcgggaactcttacgtgagttggtttgcctattggggacaggggacactggtcaccgtctcctcaggaggtggtggatcccaggtgcagctgaaacagagcggcccgggcctggtgcagccgagccagagcctgagcattacctgcaccgtgagcggctttagcctgaccaactatggcgtgcattgggtgcgccagagcccgggcaaaggcctggaatggctgggcgtgatttggagcggcggcaacaccgattataacaccccgtttaccagccgcctgagcattaacaaagataacagcaaaagccaggtgttttttaaaatgaacagcctgcaaagccaggataccgcgatttattattgcgcgcgcgcgctgacctattatgattatgaatttgcgtattggggccagggcaccctggtgaccgtgagcgcggctagcaccaagggcccatcggtcttccccctggcaccctcctccaagagcacctctgggggcacagcggccctgggctgcctggtcaaggactacttccccgaaccggtgacggtgtcgtggaactcaggcgccctgaccagcggcgtgcacaccttcccggctgtcctacagtcctcaggactctactccctcagcagcgtggtgaccgtgccctccagcagcttgggcacccagacctacatctgcaacgtgaatcacaagcccagcaacaccaaggtggacaagaaagttgagcccaaatcttgtgacaaaactcacacatgcccaccgtgcccagcacctgaactcctggggggaccgtcagtcttcctcttccccccaaaacccaaggacaccctcatgatctcccggacccctgaggtcacatgcgtggtggtggacgtgagccacgaagaccctgaggtcaagttcaactggtacgtggacggcgtggaggtgcataatgccaagacaaagccgcgggaggagcagtaccagagcacgtaccgtgtggtcagcgtcctcaccgtcctgcaccaggactggctgaatggcaaggagtacaagtgcaaggtctccaacaaagccctcccagcccccatcgagaaaaccatctccaaagccaaagggcagccccgagaaccacaggtgtacaccctgcccccatcccgggaggagatgaccaagaaccaggtcagcctgacctgcctggtcaaaggcttctatcccagcgacatcgccgtggagtgggagagcaatgggcagccggagaacaactacaagaccacgcctcccgtgctggactccgacggctccttcttcctctacagcaagctcaccgtggacaagagcaggtggcagcaggggaacgtcttctcatgctccgtgatgcatgaggctctgcacaaccactacacgcagaagagcctctccctgtctccgggtaaatga

SEQ ID NO: 480 - protein, 752 aa, Artificial Sequence
  Synthetic polypeptide
QGQSGQMMYCGGNEVLCGPRVGSSGGSGGSGGISSGLLSGRSDNHGGGSQTVVTQEPSLTVSPGGTVTLTCRSSTGAVTTSNYANWVQQKPGQAPRGLIGGTNKRAPGTPARFSGSLLGGKAALTLSGVQPEDEAEYYCALWYSNLWVFGGGTKLTVLGGGGSGGGGSGGGGSEVQLVESGGGLVQPGGSLKLSCAASGFTFNTYAMNWVRQAPGKGLEWVARIRSKYNNYATYYADSVKDRFTISRDDSKNTAYLQMNNLKTEDTAVYYCVRHGNFGNSYVSWFAYWGQGTLVTVSSGGGGSQVQLKQSGPGLVQPSQSLSITCTVSGFSLTNYGVHWVRQSPGKGLEWLGVIWSGGNTDYNTPFTSRLSINKDNSKSQVFFKMNSLQSQDTAIYYCARALTYYDYEFAYWGQGTLVTVSAASTKGPSVFPLAPSSKSTSGGTAALGCLVKDYFPEPVTVSWNSGALTSGVHTFPAVLQSSGLYSLSSVVTVPSSSLGTQTYICNVNHKPSNTKVDKKVEPKSCDKTHTCPPCPAPELLGGPSVFLFPPKPKDTLMISRTPEVTCVVVDVSHEDPEVKFNWYVDGVEVHNAKTKPREEQYQSTYRVVSVLTVLHQDWLNGKEYKCKVSNKALPAPIEKTISKAKGQPREPQVYTLPPSREEMTKNQVSLTCLVKGFYPSDIAVEWESNGQPENNYKTTPPVLDSDGSFFLYSKLTVDKSRWQQGNVFSCSVMHEALHNHYTQKSLSLSPGK

SEQ ID NO: 481 - DNA, 801 bp, Artificial Sequence
  Synthetic polynucleotide
caaggccagtctggccagtgcatctcacctcgtggttgtccggacggcccatacgtcatgtacggctcgagcggtggcagcggtggctctggtggatccggtattagcagtggtctgttaagcggtcgtagcgataatcatggcagtagcggtacccagatcttgctgacccagagcccggtgattctgagcgtgagcccgggcgaacgtgtgagctttagctgccgcgcgagccagagcattggcaccaacattcattggtatcagcagcgcaccaacggcagcccgcgcctgctgattaaatatgcgagcgaaagcattagcggcattccgagccgctttagcggcagcggcagcggcaccgattttaccctgagcattaacagcgtggaaagcgaagatattgcggattattattgccagcagaacaacaactggccgaccacctttggcgcgggcaccaaactggaactgaaacgtacggtggctgcaccatctgtcttcatcttcccgccatctgatgagcagttgaaatctggaactgcctctgttgtgtgcctgctgaataacttctatcccagagaggccaaagtacagtggaaggtggataacgccctccaatcgggtaactcccaggagagtgtcacagagcaggacagcaaggacagcacctacagcctcagcagcaccctgacgctgagcaaagcagactacgagaaacacaaagtctacgcctgcgaagtcacccatcagggcctgagctcgcccgtcacaaagagcttcaacaggggagagtgttag

SEQ ID NO: 482 - protein, 266 aa, Artificial Sequence
  Synthetic polypeptide
QGQSGQCISPRGCPDGPYVMYGSSGGSGGSGGSGISSGLLSGRSDNHGSSGTQILLTQSPVILSVSPGERVSFSCRASQSIGTNIHWYQQRTNGSPRLLIKYASESISGIPSRFSGSGSGTDFTLSINSVESEDIADYYCQQNNNWPTTFGAGTKLELKRTVAAPSVFIFPPSDEQLKSGTASVVCLLNNFYPREAKVQWKVDNALQSGNSQESVTEQDSKDSTYSLSSTLTLSKADYEKHKVYACEVTHQGLSSPVTKSFNRGEC

SEQ ID NO: 483 - DNA, 672 bp, Artificial Sequence
  Synthetic polynucleotide
tccgataatcatggcagtagcggtacccagatcttgctgacccagagcccggtgattctgagcgtgagcccgggcgaacgtgtgagctttagctgccgcgcgagccagagcattggcaccaacattcattggtatcagcagcgcaccaacggcagcccgcgcctgctgattaaatatgcgagcgaaagcattagcggcattccgagccgctttagcggcagcggcagcggcaccgattttaccctgagcattaacagcgtggaaagcgaagatattgcggattattattgccagcagaacaacaactggccgaccacctttggcgcgggcaccaaactggaactgaaacgtacggtggctgcaccatctgtcttcatcttcccgccatctgatgagcagttgaaatctggaactgcctctgttgtgtgcctgctgaataacttctatcccagagaggccaaagtacagtggaaggtggataacgccctccaatcgggtaactcccaggagagtgtcacagagcaggacagcaaggacagcacctacagcctcagcagcaccctgacgctgagcaaagcagactacgagaaacacaaagtctacgcctgcgaagtcacccatcagggcctgagctcgcccgtcacaaagagcttcaacaggggagagtgttag

SEQ ID NO: 484 - protein, 223 aa, Artificial Sequence
  Synthetic polypeptide
SDNHGSSGTQILLTQSPVILSVSPGERVSFSCRASQSIGTNIHWYQQRTNGSPRLLIKYASESISGIPSRFSGSGSGTDFTLSINSVESEDIADYYCQQNNNWPTTFGAGTKLELKRTVAAPSVFIFPPSDEQLKSGTASVVCLLNNFYPREAKVQWKVDNALQSGNSQESVTEQDSKDSTYSLSSTLTLSKADYEKHKVYACEVTHQGLSSPVTKSFNRGEC

SEQ ID NO: 485 - DNA, 2253 bp, Artificial Sequence
  Synthetic polynucleotide
caaggccagtctggccaaattcatccgatgtgccatcctgagggtgtttgcgttgctctggatggaggtggctcgagcggtggcagcggtggctctggtggtattagcagtggtctgttaagcggtcgtagcgataatcatggcggcggttctgaagtgcagctggtggaatctgggggcggactggtgcagcctggcaagtctctgaagctgagctgcgaggccagcggcttcacctttagcggctacggcatgcactgggtgcgccaggcacctggcagaggcctggaaagcgtggcctacatcaccagcagcagcatcaacattaagtacgccgacgccgtgaagggccggttcaccgtgtccagagacaacgccaagaacctgctgttcctgcagatgaacatcctgaagtccgaggacaccgccatgtactactgcgccagattcgactgggacaagaactactggggccagggcacaatggtcacagtgtccagcggtggaggtggtagtggtggaggaagtggaggttcaggaggtggaagcggtggtggtggtagtgacatccagatgacccagagccccagcagcctgcctgcctctctgggcgatagagtgaccatcaactgccaggccagccaggacatcagcaactacctgaactggtatcagcagaagcccggcaaggcccccaagctgctgatctactacaccaacaagctggccgacggtgtgcccagcagattcagcggcagcggtagcggcagagacagcagcttcaccatcagctccctggaatccgaggatatcggcagctactactgccagcagtactacaactacccctggaccttcggccctggcaccaagctggaaatcaaaagaggaggtggtggatcccaggtgcagctgaaacagagcggcccgggcctggtgcagccgagccagagcctgagcattacctgcaccgtgagcggctttagcctgaccaactatggcgtgcattgggtgcgccagagcccgggcaaaggcctggaatggctgggcgtgatttggagcggcggcaacaccgattataacaccccgtttaccagccgcctgagcattaacaaagataacagcaaaagccaggtgttttttaaaatgaacagcctgcaaagccaggataccgcgatttattattgcgcgcgcgcgctgacctattatgattatgaatttgcgtattggggccagggcaccctggtgaccgtgagcgcggctagcaccaagggcccatcggtcttccccctggcaccctcctccaagagcacctctgggggcacagcggccctgggctgcctggtcaaggactacttccccgaaccggtgacggtgtcgtggaactcaggcgccctgaccagcggcgtgcacaccttcccggctgtcctacagtcctcaggactctactccctcagcagcgtggtgaccgtgccctccagcagcttgggcacccagacctacatctgcaacgtgaatcacaagcccagcaacaccaaggtggacaagaaagttgagcccaaatcttgtgacaaaactcacacatgcccaccgtgcccagcacctgaactcctggggggaccgtcagtcttcctcttccccccaaaacccaaggacaccctcatgatctcccggacccctgaggtcacatgcgtggtggtggacgtgagccacgaagaccctgaggtcaagttcaactggtacgtggacggcgtggaggtgcataatgccaagacaaagccgcgggaggagcagtaccagagcacgtaccgtgtggtcagcgtcctcaccgtcctgcaccaggactggctgaatggcaaggagtacaagtgcaaggtctccaacaaagccctcccagcccccatcgagaaaaccatctccaaagccaaagggcagccccgagaaccacaggtgtacaccctgcccccatcccgggaggagatgaccaagaaccaggtcagcctgacctgcctggtcaaaggcttctatcccagcgacatcgccgtggagtgggagagcaatgggcagccggagaacaactacaagaccacgcctcccgtgctggactccgacggctccttcttcctctacagcaagctcaccgtggacaagagcaggtggcagcaggggaacgtcttctcatgctccgtgatgcatgaggctctgcacaaccactacacgcagaagagcctctccctgtctccgggtaaatga

SEQ ID NO: 486 - protein, 750 aa, Artificial Sequence
  Synthetic polypeptide
QGQSGQIHPMCHPEGVCVALDGGGSSGGSGGSGGISSGLLSGRSDNHGGGSEVQLVESGGGLVQPGKSLKLSCEASGFTFSGYGMHWVRQAPGRGLESVAYITSSSINIKYADAVKGRFTVSRDNAKNLLFLQMNILKSEDTAMYYCARFDWDKNYWGQGTMVTVSSGGGGSGGGSGGSGGGSGGGGSDIQMTQSPSSLPASLGDRVTINCQASQDISNYLNWYQQKPGKAPKLLIYYTNKLADGVPSRFSGSGSGRDSSFTISSLESEDIGSYYCQQYYNYPWTFGPGTKLEIKRGGGGSQVQLKQSGPGLVQPSQSLSITCTVSGFSLTNYGVHWVRQSPGKGLEWLGVIWSGGNTDYNTPFTSRLSINKDNSKSQVFFKMNSLQSQDTAIYYCARALTYYDYEFAYWGQGTLVTVSAASTKGPSVFPLAPSSKSTSGGTAALGCLVKDYFPEPVTVSWNSGALTSGVHTFPAVLQSSGLYSLSSVVTVPSSSLGTQTYICNVNHKPSNTKVDKKVEPKSCDKTHTCPPCPAPELLGGPSVFLFPPKPKDTLMISRTPEVTCVVVDVSHEDPEVKFNWYVDGVEVHNAKTKPREEQYQSTYRVVSVLTVLHQDWLNGKEYKCKVSNKALPAPIEKTISKAKGQPREPQVYTLPPSREEMTKNQVSLTCLVKGFYPSDIAVEWESNGQPENNYKTTPPVLDSDGSFFLYSKLTVDKSRWQQGNVFSCSVMHEALHNHYTQKSLSLSPGK

SEQ ID NO: 487 - DNA, 2253 bp, Artificial Sequence
  Synthetic polynucleotide
caaggccagtctggccaagattgctttgtgcctgggtggtatttggcgggtccgtgcgctcagggaggtggctcgagcggtggcagcggtggctctggtggtattagcagtggtctgttaagcggtcgtagcgataatcatggcggcggttctgaagtgcagctggtggaatctgggggcggactggtgcagcctggcaagtctctgaagctgagctgcgaggccagcggcttcacctttagcggctacggcatgcactgggtgcgccaggcacctggcagaggcctggaaagcgtggcctacatcaccagcagcagcatcaacattaagtacgccgacgccgtgaagggccggttcaccgtgtccagagacaacgccaagaacctgctgttcctgcagatgaacatcctgaagtccgaggacaccgccatgtactactgcgccagattcgactgggacaagaactactggggccagggcacaatggtcacagtgtccagcggtggaggtggtagtggtggaggaagtggaggttcaggaggtggaagcggtggtggtggtagtgacatccagatgacccagagccccagcagcctgcctgcctctctgggcgatagagtgaccatcaactgccaggccagccaggacatcagcaactacctgaactggtatcagcagaagcccggcaaggcccccaagctgctgatctactacaccaacaagctggccgacggtgtgcccagcagattcagcggcagcggtagcggcagagacagcagcttcaccatcagctccctggaatccgaggatatcggcagctactactgccagcagtactacaactacccctggaccttcggccctggcaccaagctggaaatcaaaagaggaggtggtggatcccaggtgcagctgaaacagagcggcccgggcctggtgcagccgagccagagcctgagcattacctgcaccgtgagcggctttagcctgaccaactatggcgtgcattgggtgcgccagagcccgggcaaaggcctggaatggctgggcgtgatttggagcggcggcaacaccgattataacaccccgtttaccagccgcctgagcattaacaaagataacagcaaaagccaggtgttttttaaaatgaacagcctgcaaagccaggataccgcgatttattattgcgcgcgcgcgctgacctattatgattatgaatttgcgtattggggccagggcaccctggtgaccgtgagcgcggctagcaccaagggcccatcggtcttccccctggcaccctcctccaagagcacctctgggggcacagcggccctgggctgcctggtcaaggactacttccccgaaccggtgacggtgtcgtggaactcaggcgccctgaccagcggcgtgcacaccttcccggctgtcctacagtcctcaggactctactccctcagcagcgtggtgaccgtgccctccagcagcttgggcacccagacctacatctgcaacgtgaatcacaagcccagcaacaccaaggtggacaagaaagttgagcccaaatcttgtgacaaaactcacacatgcccaccgtgcccagcacctgaactcctggggggaccgtcagtcttcctcttccccccaaaacccaaggacaccctcatgatctcccggacccctgaggtcacatgcgtggtggtggacgtgagccacgaagaccctgaggtcaagttcaactggtacgtggacggcgtggaggtgcataatgccaagacaaagccgcgggaggagcagtaccagagcacgtaccgtgtggtcagcgtcctcaccgtcctgcaccaggactggctgaatggcaaggagtacaagtgcaaggtctccaacaaagccctcccagcccccatcgagaaaaccatctccaaagccaaagggcagccccgagaaccacaggtgtacaccctgcccccatcccgggaggagatgaccaagaaccaggtcagcctgacctgcctggtcaaaggcttctatcccagcgacatcgccgtggagtgggagagcaatgggcagccggagaacaactacaagaccacgcctcccgtgctggactccgacggctccttcttcctctacagcaagctcaccgtggacaagagcaggtggcagcaggggaacgtcttctcatgctccgtgatgcatgaggctctgcacaaccactacacgcagaagagcctctccctgtctccgggtaaatga

SEQ ID NO: 488 - protein, 750 aa, Artificial Sequence
  Synthetic polypeptide
QGQSGQDCFVPGWYLAGPCAQGGGSSGGSGGSGGISSGLLSGRSDNHGGGSEVQLVESGGGLVQPGKSLKLSCEASGFTFSGYGMHWVRQAPGRGLESVAYITSSSINIKYADAVKGRFTVSRDNAKNLLFLQMNILKSEDTAMYYCARFDWDKNYWGQGTMVTVSSGGGGSGGGSGGSGGGSGGGGSDIQMTQSPSSLPASLGDRVTINCQASQDISNYLNWYQQKPGKAPKLLIYYTNKLADGVPSRFSGSGSGRDSSFTISSLESEDIGSYYCQQYYNYPWTFGPGTKLEIKRGGGGSQVQLKQSGPGLVQPSQSLSITCTVSGFSLTNYGVHWVRQSPGKGLEWLGVIWSGGNTDYNTPFTSRLSINKDNSKSQVFFKMNSLQSQDTAIYYCARALTYYDYEFAYWGQGTLVTVSAASTKGPSVFPLAPSSKSTSGGTAALGCLVKDYFPEPVTVSWNSGALTSGVHTFPAVLQSSGLYSLSSVVTVPSSSLGTQTYICNVNHKPSNTKVDKKVEPKSCDKTHTCPPCPAPELLGGPSVFLFPPKPKDTLMISRTPEVTCVVVDVSHEDPEVKFNWYVDGVEVHNAKTKPREEQYQSTYRVVSVLTVLHQDWLNGKEYKCKVSNKALPAPIEKTISKAKGQPREPQVYTLPPSREEMTKNQVSLTCLVKGFYPSDIAVEWESNGQPENNYKTTPPVLDSDGSFFLYSKLTVDKSRWQQGNVFSCSVMHEALHNHYTQKSLSLSPGK

SEQ ID NO: 489 - DNA, 2253 bp, Artificial Sequence
  Synthetic polynucleotide
caaggccagtctggccaaggtgtgtgccattctcggttggagtggcttctgggttgccaaggaggaggtggctcgagcggtggcagcggtggctctggtggtattagcagtggtctgttaagcggtcgtagcgataatcatggcggcggttctgaagtgcagctggtggaatctgggggcggactggtgcagcctggcaagtctctgaagctgagctgcgaggccagcggcttcacctttagcggctacggcatgcactgggtgcgccaggcacctggcagaggcctggaaagcgtggcctacatcaccagcagcagcatcaacattaagtacgccgacgccgtgaagggccggttcaccgtgtccagagacaacgccaagaacctgctgttcctgcagatgaacatcctgaagtccgaggacaccgccatgtactactgcgccagattcgactgggacaagaactactggggccagggcacaatggtcacagtgtccagcggtggaggtggtagtggtggaggaagtggaggttcaggaggtggaagcggtggtggtggtagtgacatccagatgacccagagccccagcagcctgcctgcctctctgggcgatagagtgaccatcaactgccaggccagccaggacatcagcaactacctgaactggtatcagcagaagcccggcaaggcccccaagctgctgatctactacaccaacaagctggccgacggtgtgcccagcagattcagcggcagcggtagcggcagagacagcagcttcaccatcagctccctggaatccgaggatatcggcagctactactgccagcagtactacaactacccctggaccttcggccctggcaccaagctggaaatcaaaagaggaggtggtggatcccaggtgcagctgaaacagagcggcccgggcctggtgcagccgagccagagcctgagcattacctgcaccgtgagcggctttagcctgaccaactatggcgtgcattgggtgcgccagagcccgggcaaaggcctggaatggctgggcgtgatttggagcggcggcaacaccgattataacaccccgtttaccagccgcctgagcattaacaaagataacagcaaaagccaggtgttttttaaaatgaacagcctgcaaagccaggataccgcgatttattattgcgcgcgcgcgctgacctattatgattatgaatttgcgtattggggccagggcaccctggtgaccgtgagcgcggctagcaccaagggcccatcggtcttccccctggcaccctcctccaagagcacctctgggggcacagcggccctgggctgcctggtcaaggactacttccccgaaccggtgacggtgtcgtggaactcaggcgccctgaccagcggcgtgcacaccttcccggctgtcctacagtcctcaggactctactccctcagcagcgtggtgaccgtgccctccagcagcttgggcacccagacctacatctgcaacgtgaatcacaagcccagcaacaccaaggtggacaagaaagttgagcccaaatcttgtgacaaaactcacacatgcccaccgtgcccagcacctgaactcctggggggaccgtcagtcttcctcttccccccaaaacccaaggacaccctcatgatctcccggacccctgaggtcacatgcgtggtggtggacgtgagccacgaagaccctgaggtcaagttcaactggtacgtggacggcgtggaggtgcataatgccaagacaaagccgcgggaggagcagtaccagagcacgtaccgtgtggtcagcgtcctcaccgtcctgcaccaggactggctgaatggcaaggagtacaagtgcaaggtctccaacaaagccctcccagcccccatcgagaaaaccatctccaaagccaaagggcagccccgagaaccacaggtgtacaccctgcccccatcccgggaggagatgaccaagaaccaggtcagcctgacctgcctggtcaaaggcttctatcccagcgacatcgccgtggagtgggagagcaatgggcagccggagaacaactacaagaccacgcctcccgtgctggactccgacggctccttcttcctctacagcaagctcaccgtggacaagagcaggtggcagcaggggaacgtcttctcatgctccgtgatgcatgaggctctgcacaaccactacacgcagaagagcctctccctgtctccgggtaaatga

SEQ ID NO: 490 - protein, 750 aa, Artificial Sequence
  Synthetic polypeptide
QGQSGQGVCHSRLEWLLGCQGGGGSSGGSGGSGGISSGLLSGRSDNHGGGSEVQLVESGGGLVQPGKSLKLSCEASGFTFSGYGMHWVRQAPGRGLESVAYITSSSINIKYADAVKGRFTVSRDNAKNLLFLQMNILKSEDTAMYYCARFDWDKNYWGQGTMVTVSSGGGGSGGGSGGSGGGSGGGGSDIQMTQSPSSLPASLGDRVTINCQASQDISNYLNWYQQKPGKAPKLLIYYTNKLADGVPSRFSGSGSGRDSSFTISSLESEDIGSYYCQQYYNYPWTFGPGTKLEIKRGGGGSQVQLKQSGPGLVQPSQSLSITCTVSGFSLTNYGVHWVRQSPGKGLEWLGVIWSGGNTDYNTPFTSRLSINKDNSKSQVFFKMNSLQSQDTAIYYCARALTYYDYEFAYWGQGTLVTVSAASTKGPSVFPLAPSSKSTSGGTAALGCLVKDYFPEPVTVSWNSGALTSGVHTFPAVLQSSGLYSLSSVVTVPSSSLGTQTYICNVNHKPSNTKVDKKVEPKSCDKTHTCPPCPAPELLGGPSVFLFPPKPKDTLMISRTPEVTCVVVDVSHEDPEVKFNWYVDGVEVHNAKTKPREEQYQSTYRVVSVLTVLHQDWLNGKEYKCKVSNKALPAPIEKTISKAKGQPREPQVYTLPPSREEMTKNQVSLTCLVKGFYPSDIAVEWESNGQPENNYKTTPPVLDSDGSFFLYSKLTVDKSRWQQGNVFSCSVMHEALHNHYTQKSLSLSPGK

SEQ ID NO: 491 - DNA, 2100 bp, Artificial Sequence
  Synthetic polynucleotide
gaagtgcagctggtggaatctgggggcggactggtgcagcctggcaagtctctgaagctgagctgcgaggccagcggcttcacctttagcggctacggcatgcactgggtgcgccaggcacctggcagaggcctggaaagcgtggcctacatcaccagcagcagcatcaacattaagtacgccgacgccgtgaagggccggttcaccgtgtccagagacaacgccaagaacctgctgttcctgcagatgaacatcctgaagtccgaggacaccgccatgtactactgcgccagattcgactgggacaagaactactggggccagggcacaatggtcacagtgtccagcggtggaggtggtagtggtggaggaagtggaggttcaggaggtggaagcggtggtggtggtagtgacatccagatgacccagagccccagcagcctgcctgcctctctgggcgatagagtgaccatcaactgccaggccagccaggacatcagcaactacctgaactggtatcagcagaagcccggcaaggcccccaagctgctgatctactacaccaacaagctggccgacggtgtgcccagcagattcagcggcagcggtagcggcagagacagcagcttcaccatcagctccctggaatccgaggatatcggcagctactactgccagcagtactacaactacccctggaccttcggccctggcaccaagctggaaatcaaaagaggaggtggtggatcccaggtgcagctgaaacagagcggcccgggcctggtgcagccgagccagagcctgagcattacctgcaccgtgagcggctttagcctgaccaactatggcgtgcattgggtgcgccagagcccgggcaaaggcctggaatggctgggcgtgatttggagcggcggcaacaccgattataacaccccgtttaccagccgcctgagcattaacaaagataacagcaaaagccaggtgttttttaaaatgaacagcctgcaaagccaggataccgcgatttattattgcgcgcgcgcgctgacctattatgattatgaatttgcgtattggggccagggcaccctggtgaccgtgagcgcggctagcaccaagggcccatcggtcttccccctggcaccctcctccaagagcacctctgggggcacagcggccctgggctgcctggtcaaggactacttccccgaaccggtgacggtgtcgtggaactcaggcgccctgaccagcggcgtgcacaccttcccggctgtcctacagtcctcaggactctactccctcagcagcgtggtgaccgtgccctccagcagcttgggcacccagacctacatctgcaacgtgaatcacaagcccagcaacaccaaggtggacaagaaagttgagcccaaatcttgtgacaaaactcacacatgcccaccgtgcccagcacctgaactcctggggggaccgtcagtcttcctcttccccccaaaacccaaggacaccctcatgatctcccggacccctgaggtcacatgcgtggtggtggacgtgagccacgaagaccctgaggtcaagttcaactggtacgtggacggcgtggaggtgcataatgccaagacaaagccgcgggaggagcagtaccagagcacgtaccgtgtggtcagcgtcctcaccgtcctgcaccaggactggctgaatggcaaggagtacaagtgcaaggtctccaacaaagccctcccagcccccatcgagaaaaccatctccaaagccaaagggcagccccgagaaccacaggtgtacaccctgcccccatcccgggaggagatgaccaagaaccaggtcagcctgacctgcctggtcaaaggcttctatcccagcgacatcgccgtggagtgggagagcaatgggcagccggagaacaactacaagaccacgcctcccgtgctggactccgacggctccttcttcctctacagcaagctcaccgtggacaagagcaggtggcagcaggggaacgtcttctcatgctccgtgatgcatgaggctctgcacaaccactacacgcagaagagcctctccctgtctccgggtaaatga

SEQ ID NO: 492 - protein, 699 aa, Artificial Sequence
  Synthetic polypeptide
EVQLVESGGGLVQPGKSLKLSCEASGFTFSGYGMHWVRQAPGRGLESVAYITSSSINIKYADAVKGRFTVSRDNAKNLLFLQMNILKSEDTAMYYCARFDWDKNYWGQGTMVTVSSGGGGSGGGSGGSGGGSGGGGSDIQMTQSPSSLPASLGDRVTINCQASQDISNYLNWYQQKPGKAPKLLIYYTNKLADGVPSRFSGSGSGRDSSFTISSLESEDIGSYYCQQYYNYPWTFGPGTKLEIKRGGGGSQVQLKQSGPGLVQPSQSLSITCTVSGFSLTNYGVHWVRQSPGKGLEWLGVIWSGGNTDYNTPFTSRLSINKDNSKSQVFFKMNSLQSQDTAIYYCARALTYYDYEFAYWGQGTLVTVSAASTKGPSVFPLAPSSKSTSGGTAALGCLVKDYFPEPVTVSWNSGALTSGVHTFPAVLQSSGLYSLSSVVTVPSSSLGTQTYICNVNHKPSNTKVDKKVEPKSCDKTHTCPPCPAPELLGGPSVFLFPPKPKDTLMISRTPEVTCVVVDVSHEDPEVKFNWYVDGVEVHNAKTKPREEQYQSTYRVVSVLTVLHQDWLNGKEYKCKVSNKALPAPIEKTISKAKGQPREPQVYTLPPSREEMTKNQVSLTCLVKGFYPSDIAVEWESNGQPENNYKTTPPVLDSDGSFFLYSKLTVDKSRWQQGNVFSCSVMHEALHNHYTQKSLSLSPGK

SEQ ID NO: 493 - DNA, 2253 bp, Artificial Sequence
  Synthetic polynucleotide
caaggccagtctggccaattgcatcctatgtgccatcctgagggtctgtgcaagtttactcctggaggtggctcgagcggtggcagcggtggctctggtggtattagcagtggtctgttaagcggtcgtagcgataatcatggcggcggttctgaagtgcagctggtggaatctgggggcggactggtgcagcctggcaagtctctgaagctgagctgcgaggccagcggcttcacctttagcggctacggcatgcactgggtgcgccaggcacctggcagaggcctggaaagcgtggcctacatcaccagcagcagcatcaacattaagtacgccgacgccgtgaagggccggttcaccgtgtccagagacaacgccaagaacctgctgttcctgcagatgaacatcctgaagtccgaggacaccgccatgtactactgcgccagattcgactgggacaagaactactggggccagggcacaatggtcacagtgtccagcggtggaggtggtagtggtggaggaagtggaggttcaggaggtggaagcggtggtggtggtagtgacatccagatgacccagagccccagcagcctgcctgcctctctgggcgatagagtgaccatcaactgccaggccagccaggacatcagcaactacctgaactggtatcagcagaagcccggcaaggcccccaagctgctgatctactacaccaacaagctggccgacggtgtgcccagcagattcagcggcagcggtagcggcagagacagcagcttcaccatcagctccctggaatccgaggatatcggcagctactactgccagcagtactacaactacccctggaccttcggccctggcaccaagctggaaatcaaaagaggaggtggtggatcccaggtgcagctgaaacagagcggcccgggcctggtgcagccgagccagagcctgagcattacctgcaccgtgagcggctttagcctgaccaactatggcgtgcattgggtgcgccagagcccgggcaaaggcctggaatggctgggcgtgatttggagcggcggcaacaccgattataacaccccgtttaccagccgcctgagcattaacaaagataacagcaaaagccaggtgttttttaaaatgaacagcctgcaaagccaggataccgcgatttattattgcgcgcgcgcgctgacctattatgattatgaatttgcgtattggggccagggcaccctggtgaccgtgagcgcggctagcaccaagggcccatcggtcttccccctggcaccctcctccaagagcacctctgggggcacagcggccctgggctgcctggtcaaggactacttccccgaaccggtgacggtgtcgtggaactcaggcgccctgaccagcggcgtgcacaccttcccggctgtcctacagtcctcaggactctactccctcagcagcgtggtgaccgtgccctccagcagcttgggcacccagacctacatctgcaacgtgaatcacaagcccagcaacaccaaggtggacaagaaagttgagcccaaatcttgtgacaaaactcacacatgcccaccgtgcccagcacctgaactcctggggggaccgtcagtcttcctcttccccccaaaacccaaggacaccctcatgatctcccggacccctgaggtcacatgcgtggtggtggacgtgagccacgaagaccctgaggtcaagttcaactggtacgtggacggcgtggaggtgcataatgccaagacaaagccgcgggaggagcagtaccagagcacgtaccgtgtggtcagcgtcctcaccgtcctgcaccaggactggctgaatggcaaggagtacaagtgcaaggtctccaacaaagccctcccagcccccatcgagaaaaccatctccaaagccaaagggcagccccgagaaccacaggtgtacaccctgcccccatcccgggaggagatgaccaagaaccaggtcagcctgacctgcctggtcaaaggcttctatcccagcgacatcgccgtggagtgggagagcaatgggcagccggagaacaactacaagaccacgcctcccgtgctggactccgacggctccttcttcctctacagcaagctcaccgtggacaagagcaggtggcagcaggggaacgtcttctcatgctccgtgatgcatgaggctctgcacaaccactacacgcagaagagcctctccctgtctccgggtaaatga

SEQ ID NO: 494 - protein, 750 aa, Artificial Sequence
  Synthetic polypeptide
QGQSGQLHPMCHPEGLCKFTPGGGSSGGSGGSGGISSGLLSGRSDNHGGGSEVQLVESGGGLVQPGKSLKLSCEASGFTFSGYGMHWVRQAPGRGLESVAYITSSSINIKYADAVKGRFTVSRDNAKNLLFLQMNILKSEDTAMYYCARFDWDKNYWGQGTMVTVSSGGGGSGGGSGGSGGGSGGGGSDIQMTQSPSSLPASLGDRVTINCQASQDISNYLNWYQQKPGKAPKLLIYYTNKLADGVPSRFSGSGSGRDSSFTISSLESEDIGSYYCQQYYNYPWTFGPGTKLEIKRGGGGSQVQLKQSGPGLVQPSQSLSITCTVSGFSLTNYGVHWVRQSPGKGLEWLGVIWSGGNTDYNTPFTSRLSINKDNSKSQVFFKMNSLQSQDTAIYYCARALTYYDYEFAYWGQGTLVTVSAASTKGPSVFPLAPSSKSTSGGTAALGCLVKDYFPEPVTVSWNSGALTSGVHTFPAVLQSSGLYSLSSVVTVPSSSLGTQTYICNVNHKPSNTKVDKKVEPKSCDKTHTCPPCPAPELLGGPSVFLFPPKPKDTLMISRTPEVTCVVVDVSHEDPEVKFNWYVDGVEVHNAKTKPREEQYQSTYRVVSVLTVLHQDWLNGKEYKCKVSNKALPAPIEKTISKAKGQPREPQVYTLPPSREEMTKNQVSLTCLVKGFYPSDIAVEWESNGQPENNYKTTPPVLDSDGSFFLYSKLTVDKSRWQQGNVFSCSVMHEALHNHYTQKSLSLSPGK

SEQ ID NO: 495 - DNA, 2253 bp, Artificial Sequence
  Synthetic polynucleotide
caaggccagtctggccaaggtgcttgctctgatatggtttattggggttcgtgcagttggttgggaggtggctcgagcggtggcagcggtggctctggtggtattagcagtggtctgttaagcggtcgtagcgataatcatggcggcggttctgaagtgcagctggtggaatctgggggcggactggtgcagcctggcaagtctctgaagctgagctgcgaggccagcggcttcacctttagcggctacggcatgcactgggtgcgccaggcacctggcagaggcctggaaagcgtggcctacatcaccagcagcagcatcaacattaagtacgccgacgccgtgaagggccggttcaccgtgtccagagacaacgccaagaacctgctgttcctgcagatgaacatcctgaagtccgaggacaccgccatgtactactgcgccagattcgactgggacaagaactactggggccagggcacaatggtcacagtgtccagcggtggaggtggtagtggtggaggaagtggaggttcaggaggtggaagcggtggtggtggtagtgacatccagatgacccagagccccagcagcctgcctgcctctctgggcgatagagtgaccatcaactgccaggccagccaggacatcagcaactacctgaactggtatcagcagaagcccggcaaggcccccaagctgctgatctactacaccaacaagctggccgacggtgtgcccagcagattcagcggcagcggtagcggcagagacagcagcttcaccatcagctccctggaatccgaggatatcggcagctactactgccagcagtactacaactacccctggaccttcggccctggcaccaagctggaaatcaaaagaggaggtggtggatcccaggtgcagctgaaacagagcggcccgggcctggtgcagccgagccagagcctgagcattacctgcaccgtgagcggctttagcctgaccaactatggcgtgcattgggtgcgccagagcccgggcaaaggcctggaatggctgggcgtgatttggagcggcggcaacaccgattataacaccccgtttaccagccgcctgagcattaacaaagataacagcaaaagccaggtgttttttaaaatgaacagcctgcaaagccaggataccgcgatttattattgcgcgcgcgcgctgacctattatgattatgaatttgcgtattggggccagggcaccctggtgaccgtgagcgcggctagcaccaagggcccatcggtcttccccctggcaccctcctccaagagcacctctgggggcacagcggccctgggctgcctggtcaaggactacttccccgaaccggtgacggtgtcgtggaactcaggcgccctgaccagcggcgtgcacaccttcccggctgtcctacagtcctcaggactctactccctcagcagcgtggtgaccgtgccctccagcagcttgggcacccagacctacatctgcaacgtgaatcacaagcccagcaacaccaaggtggacaagaaagttgagcccaaatcttgtgacaaaactcacacatgcccaccgtgcccagcacctgaactcctggggggaccgtcagtcttcctcttccccccaaaacccaaggacaccctcatgatctcccggacccctgaggtcacatgcgtggtggtggacgtgagccacgaagaccctgaggtcaagttcaactggtacgtggacggcgtggaggtgcataatgccaagacaaagccgcgggaggagcagtaccagagcacgtaccgtgtggtcagcgtcctcaccgtcctgcaccaggactggctgaatggcaaggagtacaagtgcaaggtctccaacaaagccctcccagcccccatcgagaaaaccatctccaaagccaaagggcagccccgagaaccacaggtgtacaccctgcccccatcccgggaggagatgaccaagaaccaggtcagcctgacctgcctggtcaaaggcttctatcccagcgacatcgccgtggagtgggagagcaatgggcagccggagaacaactacaagaccacgcctcccgtgctggactccgacggctccttcttcctctacagcaagctcaccgtggacaagagcaggtggcagcaggggaacgtcttctcatgctccgtgatgcatgaggctctgcacaaccactacacgcagaagagcctctccctgtctccgggtaaatga

SEQ ID NO: 496 - protein, 750 aa, Artificial Sequence
  Synthetic polypeptide
QGQSGQGACSDMVYWGSCSWLGGGSSGGSGGSGGISSGLLSGRSDNHGGGSEVQLVESGGGLVQPGKSLKLSCEASGFTFSGYGMHWVRQAPGRGLESVAYITSSSINIKYADAVKGRFTVSRDNAKNLLFLQMNILKSEDTAMYYCARFDWDKNYWGQGTMVTVSSGGGGSGGGSGGSGGGSGGGGSDIQMTQSPSSLPASLGDRVTINCQASQDISNYLNWYQQKPGKAPKLLIYYTNKLADGVPSRFSGSGSGRDSSFTISSLESEDIGSYYCQQYYNYPWTFGPGTKLEIKRGGGGSQVQLKQSGPGLVQPSQSLSITCTVSGFSLTNYGVHWVRQSPGKGLEWLGVIWSGGNTDYNTPFTSRLSINKDNSKSQVFFKMNSLQSQDTAIYYCARALTYYDYEFAYWGQGTLVTVSAASTKGPSVFPLAPSSKSTSGGTAALGCLVKDYFPEPVTVSWNSGALTSGVHTFPAVLQSSGLYSLSSVVTVPSSSLGTQTYICNVNHKPSNTKVDKKVEPKSCDKTHTCPPCPAPELLGGPSVFLFPPKPKDTLMISRTPEVTCVVVDVSHEDPEVKFNWYVDGVEVHNAKTKPREEQYQSTYRVVSVLTVLHQDWLNGKEYKCKVSNKALPAPIEKTISKAKGQPREPQVYTLPPSREEMTKNQVSLTCLVKGFYPSDIAVEWESNGQPENNYKTTPPVLDSDGSFFLYSKLTVDKSRWQQGNVFSCSVMHEALHNHYTQKSLSLSPGK

SEQ ID NO: 497 - DNA, 2253 bp, Artificial Sequence
  Synthetic polynucleotide
caaggccagtctggccaagattgcattggattggatcattattttcttggaccgtgcagttctggaggtggctcgagcggtggcagcggtggctctggtggtattagcagtggtctgttaagcggtcgtagcgataatcatggcggcggttctgaagtgcagctggtggaatctgggggcggactggtgcagcctggcaagtctctgaagctgagctgcgaggccagcggcttcacctttagcggctacggcatgcactgggtgcgccaggcacctggcagaggcctggaaagcgtggcctacatcaccagcagcagcatcaacattaagtacgccgacgccgtgaagggccggttcaccgtgtccagagacaacgccaagaacctgctgttcctgcagatgaacatcctgaagtccgaggacaccgccatgtactactgcgccagattcgactgggacaagaactactggggccagggcacaatggtcacagtgtccagcggtggaggtggtagtggtggaggaagtggaggttcaggaggtggaagcggtggtggtggtagtgacatccagatgacccagagccccagcagcctgcctgcctctctgggcgatagagtgaccatcaactgccaggccagccaggacatcagcaactacctgaactggtatcagcagaagcccggcaaggcccccaagctgctgatctactacaccaacaagctggccgacggtgtgcccagcagattcagcggcagcggtagcggcagagacagcagcttcaccatcagctccctggaatccgaggatatcggcagctactactgccagcagtactacaactacccctggaccttcggccctggcaccaagctggaaatcaaaagaggaggtggtggatcccaggtgcagctgaaacagagcggcccgggcctggtgcagccgagccagagcctgagcattacctgcaccgtgagcggctttagcctgaccaactatggcgtgcattgggtgcgccagagcccgggcaaaggcctggaatggctgggcgtgatttggagcggcggcaacaccgattataacaccccgtttaccagccgcctgagcattaacaaagataacagcaaaagccaggtgttttttaaaatgaacagcctgcaaagccaggataccgcgatttattattgcgcgcgcgcgctgacctattatgattatgaatttgcgtattggggccagggcaccctggtgaccgtgagcgcggctagcaccaagggcccatcggtcttccccctggcaccctcctccaagagcacctctgggggcacagcggccctgggctgcctggtcaaggactacttccccgaaccggtgacggtgtcgtggaactcaggcgccctgaccagcggcgtgcacaccttcccggctgtcctacagtcctcaggactctactccctcagcagcgtggtgaccgtgccctccagcagcttgggcacccagacctacatctgcaacgtgaatcacaagcccagcaacaccaaggtggacaagaaagttgagcccaaatcttgtgacaaaactcacacatgcccaccgtgcccagcacctgaactcctggggggaccgtcagtcttcctcttccccccaaaacccaaggacaccctcatgatctcccggacccctgaggtcacatgcgtggtggtggacgtgagccacgaagaccctgaggtcaagttcaactggtacgtggacggcgtggaggtgcataatgccaagacaaagccgcgggaggagcagtaccagagcacgtaccgtgtggtcagcgtcctcaccgtcctgcaccaggactggctgaatggcaaggagtacaagtgcaaggtctccaacaaagccctcccagcccccatcgagaaaaccatctccaaagccaaagggcagccccgagaaccacaggtgtacaccctgcccccatcccgggaggagatgaccaagaaccaggtcagcctgacctgcctggtcaaaggcttctatcccagcgacatcgccgtggagtgggagagcaatgggcagccggagaacaactacaagaccacgcctcccgtgctggactccgacggctccttcttcctctacagcaagctcaccgtggacaagagcaggtggcagcaggggaacgtcttctcatgctccgtgatgcatgaggctctgcacaaccactacacgcagaagagcctctccctgtctccgggtaaatga

SEQ ID NO: 498 - protein, 750 aa, Artificial Sequence
  Synthetic polypeptide
QGQSGQDCIGLDHYFLGPCSSGGGSSGGSGGSGGISSGLLSGRSDNHGGGSEVQLVESGGGLVQPGKSLKLSCEASGFTFSGYGMHWVRQAPGRGLESVAYITSSSINIKYADAVKGRFTVSRDNAKNLLFLQMNILKSEDTAMYYCARFDWDKNYWGQGTMVTVSSGGGGSGGGSGGSGGGSGGGGSDIQMTQSPSSLPASLGDRVTINCQASQDISNYLNWYQQKPGKAPKLLIYYTNKLADGVPSRFSGSGSGRDSSFTISSLESEDIGSYYCQQYYNYPWTFGPGTKLEIKRGGGGSQVQLKQSGPGLVQPSQSLSITCTVSGFSLTNYGVHWVRQSPGKGLEWLGVIWSGGNTDYNTPFTSRLSINKDNSKSQVFFKMNSLQSQDTAIYYCARALTYYDYEFAYWGQGTLVTVSAASTKGPSVFPLAPSSKSTSGGTAALGCLVKDYFPEPVTVSWNSGALTSGVHTFPAVLQSSGLYSLSSVVTVPSSSLGTQTYICNVNHKPSNTKVDKKVEPKSCDKTHTCPPCPAPELLGGPSVFLFPPKPKDTLMISRTPEVTCVVVDVSHEDPEVKFNWYVDGVEVHNAKTKPREEQYQSTYRVVSVLTVLHQDWLNGKEYKCKVSNKALPAPIEKTISKAKGQPREPQVYTLPPSREEMTKNQVSLTCLVKGFYPSDIAVEWESNGQPENNYKTTPPVLDSDGSFFLYSKLTVDKSRWQQGNVFSCSVMHEALHNHYTQKSLSLSPGK

SEQ ID NO: 499 - DNA, 2253 bp, Artificial Sequence
  Synthetic polynucleotide
caaggccagtctggccaatctatgtgcactgagcagcagtggattgtgaatcattgcattagtggaggtggctcgagcggtggcagcggtggctctggtggtattagcagtggtctgttaagcggtcgtagcgataatcatggcggcggttctgaagtgcagctggtggaatctgggggcggactggtgcagcctggcaagtctctgaagctgagctgcgaggccagcggcttcacctttagcggctacggcatgcactgggtgcgccaggcacctggcagaggcctggaaagcgtggcctacatcaccagcagcagcatcaacattaagtacgccgacgccgtgaagggccggttcaccgtgtccagagacaacgccaagaacctgctgttcctgcagatgaacatcctgaagtccgaggacaccgccatgtactactgcgccagattcgactgggacaagaactactggggccagggcacaatggtcacagtgtccagcggtggaggtggtagtggtggaggaagtggaggttcaggaggtggaagcggtggtggtggtagtgacatccagatgacccagagccccagcagcctgcctgcctctctgggcgatagagtgaccatcaactgccaggccagccaggacatcagcaactacctgaactggtatcagcagaagcccggcaaggcccccaagctgctgatctactacaccaacaagctggccgacggtgtgcccagcagattcagcggcagcggtagcggcagagacagcagcttcaccatcagctccctggaatccgaggatatcggcagctactactgccagcagtactacaactacccctggaccttcggccctggcaccaagctggaaatcaaaagaggaggtggtggatcccaggtgcagctgaaacagagcggcccgggcctggtgcagccgagccagagcctgagcattacctgcaccgtgagcggctttagcctgaccaactatggcgtgcattgggtgcgccagagcccgggcaaaggcctggaatggctgggcgtgatttggagcggcggcaacaccgattataacaccccgtttaccagccgcctgagcattaacaaagataacagcaaaagccaggtgttttttaaaatgaacagcctgcaaagccaggataccgcgatttattattgcgcgcgcgcgctgacctattatgattatgaatttgcgtattggggccagggcaccctggtgaccgtgagcgcggctagcaccaagggcccatcggtcttccccctggcaccctcctccaagagcacctctgggggcacagcggccctgggctgcctggtcaaggactacttccccgaaccggtgacggtgtcgtggaactcaggcgccctgaccagcggcgtgcacaccttcccggctgtcctacagtcctcaggactctactccctcagcagcgtggtgaccgtgccctccagcagcttgggcacccagacctacatctgcaacgtgaatcacaagcccagcaacaccaaggtggacaagaaagttgagcccaaatcttgtgacaaaactcacacatgcccaccgtgcccagcacctgaactcctggggggaccgtcagtcttcctcttccccccaaaacccaaggacaccctcatgatctcccggacccctgaggtcacatgcgtggtggtggacgtgagccacgaagaccctgaggtcaagttcaactggtacgtggacggcgtggaggtgcataatgccaagacaaagccgcgggaggagcagtaccagagcacgtaccgtgtggtcagcgtcctcaccgtcctgcaccaggactggctgaatggcaaggagtacaagtgcaaggtctccaacaaagccctcccagcccccatcgagaaaaccatctccaaagccaaagggcagccccgagaaccacaggtgtacaccctgcccccatcccgggaggagatgaccaagaaccaggtcagcctgacctgcctggtcaaaggcttctatcccagcgacatcgccgtggagtgggagagcaatgggcagccggagaacaactacaagaccacgcctcccgtgctggactccgacggctccttcttcctctacagcaagctcaccgtggacaagagcaggtggcagcaggggaacgtcttctcatgctccgtgatgcatgaggctctgcacaaccactacacgcagaagagcctctccctgtctccgggtaaatga

SEQ ID NO: 500 - protein, 750 aa, Artificial Sequence
  Synthetic polypeptide
QGQSGQSMCTEQQWIVNHCISGGGSSGGSGGSGGISSGLLSGRSDNHGGGSEVQLVESGGGLVQPGKSLKLSCEASGFTFSGYGMHWVRQAPGRGLESVAYITSSSINIKYADAVKGRFTVSRDNAKNLLFLQMNILKSEDTAMYYCARFDWDKNYWGQGTMVTVSSGGGGSGGGSGGSGGGSGGGGSDIQMTQSPSSLPASLGDRVTINCQASQDISNYLNWYQQKPGKAPKLLIYYTNKLADGVPSRFSGSGSGRDSSFTISSLESEDIGSYYCQQYYNYPWTFGPGTKLEIKRGGGGSQVQLKQSGPGLVQPSQSLSITCTVSGFSLTNYGVHWVRQSPGKGLEWLGVIWSGGNTDYNTPFTSRLSINKDNSKSQVFFKMNSLQSQDTAIYYCARALTYYDYEFAYWGQGTLVTVSAASTKGPSVFPLAPSSKSTSGGTAALGCLVKDYFPEPVTVSWNSGALTSGVHTFPAVLQSSGLYSLSSVVTVPSSSLGTQTYICNVNHKPSNTKVDKKVEPKSCDKTHTCPPCPAPELLGGPSVFLFPPKPKDTLMISRTPEVTCVVVDVSHEDPEVKFNWYVDGVEVHNAKTKPREEQYQSTYRVVSVLTVLHQDWLNGKEYKCKVSNKALPAPIEKTISKAKGQPREPQVYTLPPSREEMTKNQVSLTCLVKGFYPSDIAVEWESNGQPENNYKTTPPVLDSDGSFFLYSKLTVDKSRWQQGNVFSCSVMHEALHNHYTQKSLSLSPGK

SEQ ID NO: 501 - DNA, 2253 bp, Artificial Sequence
  Synthetic polynucleotide
caaggccagtctggccaagtgggtgagtgcgttccgggtccgcatgggtgctggatggcttatggaggtggctcgagcggtggcagcggtggctctggtggtattagcagtggtctgttaagcggtcgtagcgataatcatggcggcggttctgaagtgcagctggtggaatctgggggcggactggtgcagcctggcaagtctctgaagctgagctgcgaggccagcggcttcacctttagcggctacggcatgcactgggtgcgccaggcacctggcagaggcctggaaagcgtggcctacatcaccagcagcagcatcaacattaagtacgccgacgccgtgaagggccggttcaccgtgtccagagacaacgccaagaacctgctgttcctgcagatgaacatcctgaagtccgaggacaccgccatgtactactgcgccagattcgactgggacaagaactactggggccagggcacaatggtcacagtgtccagcggtggaggtggtagtggtggaggaagtggaggttcaggaggtggaagcggtggtggtggtagtgacatccagatgacccagagccccagcagcctgcctgcctctctgggcgatagagtgaccatcaactgccaggccagccaggacatcagcaactacctgaactggtatcagcagaagcccggcaaggcccccaagctgctgatctactacaccaacaagctggccgacggtgtgcccagcagattcagcggcagcggtagcggcagagacagcagcttcaccatcagctccctggaatccgaggatatcggcagctactactgccagcagtactacaactacccctggaccttcggccctggcaccaagctggaaatcaaaagaggaggtggtggatcccaggtgcagctgaaacagagcggcccgggcctggtgcagccgagccagagcctgagcattacctgcaccgtgagcggctttagcctgaccaactatggcgtgcattgggtgcgccagagcccgggcaaaggcctggaatggctgggcgtgatttggagcggcggcaacaccgattataacaccccgtttaccagccgcctgagcattaacaaagataacagcaaaagccaggtgttttttaaaatgaacagcctgcaaagccaggataccgcgatttattattgcgcgcgcgcgctgacctattatgattatgaatttgcgtattggggccagggcaccctggtgaccgtgagcgcggctagcaccaagggcccatcggtcttccccctggcaccctcctccaagagcacctctgggggcacagcggccctgggctgcctggtcaaggactacttccccgaaccggtgacggtgtcgtggaactcaggcgccctgaccagcggcgtgcacaccttcccggctgtcctacagtcctcaggactctactccctcagcagcgtggtgaccgtgccctccagcagcttgggcacccagacctacatctgcaacgtgaatcacaagcccagcaacaccaaggtggacaagaaagttgagcccaaatcttgtgacaaaactcacacatgcccaccgtgcccagcacctgaactcctggggggaccgtcagtcttcctcttccccccaaaacccaaggacaccctcatgatctcccggacccctgaggtcacatgcgtggtggtggacgtgagccacgaagaccctgaggtcaagttcaactggtacgtggacggcgtggaggtgcataatgccaagacaaagccgcgggaggagcagtaccagagcacgtaccgtgtggtcagcgtcctcaccgtcctgcaccaggactggctgaatggcaaggagtacaagtgcaaggtctccaacaaagccctcccagcccccatcgagaaaaccatctccaaagccaaagggcagccccgagaaccacaggtgtacaccctgcccccatcccgggaggagatgaccaagaaccaggtcagcctgacctgcctggtcaaaggcttctatcccagcgacatcgccgtggagtgggagagcaatgggcagccggagaacaactacaagaccacgcctcccgtgctggactccgacggctccttcttcctctacagcaagctcaccgtggacaagagcaggtggcagcaggggaacgtcttctcatgctccgtgatgcatgaggctctgcacaaccactacacgcagaagagcctctccctgtctccgggtaaatga

SEQ ID NO: 502 - protein, 750 aa, Artificial Sequence
  Synthetic polypeptide
QGQSGQVGECVPGPHGCWMAYGGGSSGGSGGSGGISSGLLSGRSDNHGGGSEVQLVESGGGLVQPGKSLKLSCEASGFTFSGYGMHWVRQAPGRGLESVAYITSSSINIKYADAVKGRFTVSRDNAKNLLFLQMNILKSEDTAMYYCARFDWDKNYWGQGTMVTVSSGGGGSGGGSGGSGGGSGGGGSDIQMTQSPSSLPASLGDRVTINCQASQDISNYLNWYQQKPGKAPKLLIYYTNKLADGVPSRFSGSGSGRDSSFTISSLESEDIGSYYCQQYYNYPWTFGPGTKLEIKRGGGGSQVQLKQSGPGLVQPSQSLSITCTVSGFSLTNYGVHWVRQSPGKGLEWLGVIWSGGNTDYNTPFTSRLSINKDNSKSQVFFKMNSLQSQDTAIYYCARALTYYDYEFAYWGQGTLVTVSAASTKGPSVFPLAPSSKSTSGGTAALGCLVKDYFPEPVTVSWNSGALTSGVHTFPAVLQSSGLYSLSSVVTVPSSSLGTQTYICNVNHKPSNTKVDKKVEPKSCDKTHTCPPCPAPELLGGPSVFLFPPKPKDTLMISRTPEVTCVVVDVSHEDPEVKFNWYVDGVEVHNAKTKPREEQYQSTYRVVSVLTVLHQDWLNGKEYKCKVSNKALPAPIEKTISKAKGQPREPQVYTLPPSREEMTKNQVSLTCLVKGFYPSDIAVEWESNGQPENNYKTTPPVLDSDGSFFLYSKLTVDKSRWQQGNVFSCSVMHEALHNHYTQKSLSLSPGK

SEQ ID NO: 503 - DNA, 2253 bp, Artificial Sequence; identical to SEQ ID NO: 475
  Synthetic polynucleotide

SEQ ID NO: 504 - protein, 750 aa, Artificial Sequence; identical to SEQ ID NO: 476
  Synthetic polypeptide

SEQ ID NO: 505 - DNA, 1512 bp, Artificial Sequence
  Synthetic polynucleotide
gacatcttgctgactcagtctccagtcatcctgtctgtgagtccaggagaaagagtcagtttctcctgcagggccagtcagagcattggcacaaacatacactggtatcagcaaagaacaaatggttctccaaggcttctcataaagtatgcttctgagtctatctctgggatcccttccaggtttagtggcagtggatcagggacagattttactcttagcatcaacagtgtggagtctgaagatattgcagattattactgtcaacaaaataataactggccaaccacatttggtgcaggaacaaagctggaactgaaaggtggtggtggttctggcggcggcggctccggtggtggtggttctcaggtgcagctgaagcagtcaggacctggcctagtgcagccctcacagagcctgtccatcacctgcacagtctctggtttctcattaactaactatggagtacactgggttcgccagtctccaggaaagggtctggagtggctgggagtgatatggagtggtggaaacacagactataatacacctttcacatccagactgagcatcaacaaggacaattccaagagccaagttttctttaaaatgaacagtctgcaatctaatgacacagccatatattactgtgccagagccctgacctattatgactacgagttcgcctattggggtcagggaaccctggttaccgtgtcttccggaggtggtggatccgaggtgcagctggtcgagtctggaggaggattggtgcagcctggagggtcattgaaactctcatgtgcagcctctggattcaccttcaataagtacgccatgaactgggtccgccaggctccaggaaagggtttggaatgggttgctcgcataagaagtaaatataataattatgcaacatattatgccgattcagtgaaagacaggttcaccatctccagagatgattcaaaaaacactgcctatctacaaatgaacaacttgaaaactgaggacactgccgtgtactactgtgtgagacatgggaacttcggtaatagctacatatcctactgggcttactggggccaagggactctggtcaccgtctcctcaggtggtggtggttctggcggcggcggctccggtggtggtggttctcagactgttgtgactcaggaaccttcactcaccgtatcacctggtggaacagtcacactcacttgtggctcctcgactggggctgttacatctggctactacccaaactgggtccaacaaaaaccaggtcaggcaccccgtggtctaataggtgggactaagttcctcgcccccggtactcctgccagattctcaggctccctgcttggaggcaaggctgccctcaccctctcaggggtacagccagaggatgaggcagaatattactgtgctctatggtacagcaaccgctgggtgttcggtggaggaaccaaactgactgtcctacaccatcaccaccatcatcaccactag

SEQ ID NO: 506 - protein, 495 aa, Artificial Sequence
  Synthetic polypeptide
DILLTQSPVILSVSPGERVSFSCRASQSIGTNIHWYQQRTNGSPRLLIKYASESISGIPSRFSGSGSGTDFTLSINSVESEDIADYYCQQNNNWPTTFGAGTKLELKGGGGSGGGGSGGGGSQVQLKQSGPGLVQPSQSLSITCTVSGFSLTNYGVHWVRQSPGKGLEWLGVIWSGGNTDYNTPFTSRLSINKDNSKSQVFFKMNSLQSNDTAIYYCARALTYYDYEFAYWGQGTLVTVSSGGGGSEVQLVESGGGLVQPGGSLKLSCAASGFTFNKYAMNWVRQAPGKGLEWVARIRSKYNNYATYYADSVKDRFTISRDDSKNTAYLQMNNLKTEDTAVYYCVRHGNFGNSYISYWAYWGQGTLVTVSSGGGGSGGGGSGGGGSQTVVTQEPSLTVSPGGTVTLTCGSSTGAVTSGYYPNWVQQKPGQAPRGLIGGTKFLAPGTPARFSGSLLGGKAALTLSGVQPEDEAEYYCALWYSNRWVFGGGTKLTVL

SEQ ID NO: 507 - DNA, 18 bp, Artificial Sequence
  Synthetic oligonucleotide
caaggccagtctggccag

SEQ ID NO: 508 - protein, 255 aa, Artificial Sequence
  Synthetic polypeptide
CISPRGCPDGPYVMYGSSGGSGGSGGSGLSGRSDNHGSSGTQILLTQSPVILSVSPGERVSFSCRASQSIGTNIHWYQQRTNGSPRLLIKYASESISGIPSRFSGSGSGTDFTLSINSVESEDIADYYCQQNNNWPTTFGAGTKLELKRTVAAPSVFIFPPSDEQLKSGTASVVCLLNNFYPREAKVQWKVDNALQSGNSQESVTEQDSKDSTYSLSSTLTLSKADYEKHKVYACEVTHQGLSSPVTKSFNRGEC

SEQ ID NO: 509 - DNA, 768 bp, Artificial Sequence
  Synthetic polynucleotide
tgcatctcacctcgtggttgtccggacggcccatacgtcatgtacggctcgagcggtggcagcggtggctctggtggatccggtctgagcggccgttccgataatcatggcagtagcggtacccagatcttgctgacccagagcccggtgattctgagcgtgagcccgggcgaacgtgtgagctttagctgccgcgcgagccagagcattggcaccaacattcattggtatcagcagcgcaccaacggcagcccgcgcctgctgattaaatatgcgagcgaaagcattagcggcattccgagccgctttagcggcagcggcagcggcaccgattttaccctgagcattaacagcgtggaaagcgaagatattgcggattattattgccagcagaacaacaactggccgaccacctttggcgcgggcaccaaactggaactgaaacgtacggtggctgcaccatctgtcttcatcttcccgccatctgatgagcagttgaaatctggaactgcctctgttgtgtgcctgctgaataacttctatcccagagaggccaaagtacagtggaaggtggataacgccctccaatcgggtaactcccaggagagtgtcacagagcaggacagcaaggacagcacctacagcctcagcagcaccctgacgctgagcaaagcagactacgagaaacacaaagtctacgcctgcgaagtcacccatcagggcctgagctcgcccgtcacaaagagcttcaacaggggagagtgttag

SEQ ID NO: 510 - protein, 741 aa, Artificial Sequence
  Synthetic polypeptide
GYRWGCEWNCGGITTGSSGGSGGSGGLSGRSDNHGGGSQTVVTQEPSLTVSPGGTVTLTCRSSTGAVTTSNYANWVQQKPGQAPRGLIGGTNKRAPGTPARFSGSLLGGKAALTLSGVQPEDEAEYYCALWYSNLWVFGGGTKLTVLGGGGSGGGGSGGGGSEVQLVESGGGLVQPGGSLKLSCAASGFTFNTYAMNWVRQAPGKGLEWVARIRSKYNNYATYYADSVKDRFTISRDDSKNTAYLQMNNLKTEDTAVYYCVRHGNFGNSYVSWFAYWGQGTLVTVSSGGGGSQVQLKQSGPGLVQPSQSLSITCTVSGFSLTNYGVHWVRQSPGKGLEWLGVIWSGGNTDYNTPFTSRLSINKDNSKSQVFFKMNSLQSQDTAIYYCARALTYYDYEFAYWGQGTLVTVSAASTKGPSVFPLAPSSKSTSGGTAALGCLVKDYFPEPVTVSWNSGALTSGVHTFPAVLQSSGLYSLSSVVTVPSSSLGTQTYICNVNHKPSNTKVDKKVEPKSCDKTHTCPPCPAPELLGGPSVFLFPPKPKDTLMISRTPEVTCVVVDVSHEDPEVKFNWYVDGVEVHNAKTKPREEQYQSTYRVVSVLTVLHQDWLNGKEYKCKVSNKALPAPIEKTISKAKGQPREPQVYTLPPSREEMTKNQVSLTCLVKGFYPSDIAVEWESNGQPENNYKTTPPVLDSDGSFFLYSKLTVDKSRWQQGNVFSCSVMHEALHNHYTQKSLSLSPGK

SEQ ID NO: 511 - DNA, 2226 bp, Artificial Sequence
  Synthetic polynucleotide
atgatgtattgcggtgggaatgaggtgttgtgcgggccgcgggttggctcgagcggtggcagcggtggctctggtggtctgagcggccgttccgataatcatggcggcggttctcagaccgtggtcacacaggagccctcactgacagtgagccctggcgggaccgtcacactgacttgtcgcagttcaactggcgccgtgactaccagcaattacgctaactgggtccagcagaaaccaggacaggcaccacgaggactgatcggaggaactaataagagagcaccaggaacccctgcaaggttctccggatctctgctggggggaaaagccgctctgacactgagcggcgtgcagcctgaggacgaagctgagtactattgcgcactgtggtactccaacctgtgggtgtttggcgggggaactaagctgaccgtcctgggaggaggaggaagcggaggaggagggagcggaggaggaggatccgaagtgcagctggtcgagagcggaggaggactggtgcagccaggaggatccctgaagctgtcttgtgcagccagtggcttcaccttcaacacttacgcaatgaactgggtgcggcaggcacctgggaagggactggaatgggtcgcccggatcagatctaaatacaataactatgccacctactatgctgacagtgtgaaggataggttcaccatttcacgcgacgatagcaaaaacacagcttatctgcagatgaataacctgaagaccgaggatacagcagtgtactattgcgtcagacacggcaatttcgggaactcttacgtgagttggtttgcctattggggacaggggacactggtcaccgtctcctcaggaggtggtggatcccaggtgcagctgaaacagagcggcccgggcctggtgcagccgagccagagcctgagcattacctgcaccgtgagcggctttagcctgaccaactatggcgtgcattgggtgcgccagagcccgggcaaaggcctggaatggctgggcgtgatttggagcggcggcaacaccgattataacaccccgtttaccagccgcctgagcattaacaaagataacagcaaaagccaggtgttttttaaaatgaacagcctgcaaagccaggataccgcgatttattattgcgcgcgcgcgctgacctattatgattatgaatttgcgtattggggccagggcaccctggtgaccgtgagcgcggctagcaccaagggcccatcggtcttccccctggcaccctcctccaagagcacctctgggggcacagcggccctgggctgcctggtcaaggactacttccccgaaccggtgacggtgtcgtggaactcaggcgccctgaccagcggcgtgcacaccttcccggctgtcctacagtcctcaggactctactccctcagcagcgtggtgaccgtgccctccagcagcttgggcacccagacctacatctgcaacgtgaatcacaagcccagcaacaccaaggtggacaagaaagttgagcccaaatcttgtgacaaaactcacacatgcccaccgtgcccagcacctgaactcctggggggaccgtcagtcttcctcttccccccaaaacccaaggacaccctcatgatctcccggacccctgaggtcacatgcgtggtggtggacgtgagccacgaagaccctgaggtcaagttcaactggtacgtggacggcgtggaggtgcataatgccaagacaaagccgcgggaggagcagtaccagagcacgtaccgtgtggtcagcgtcctcaccgtcctgcaccaggactggctgaatggcaaggagtacaagtgcaaggtctccaacaaagccctcccagcccccatcgagaaaaccatctccaaagccaaagggcagccccgagaaccacaggtgtacaccctgcccccatcccgggaggagatgaccaagaaccaggtcagcctgacctgcctggtcaaaggcttctatcccagcgacatcgccgtggagtgggagagcaatgggcagccggagaacaactacaagaccacgcctcccgtgctggactccgacggctccttcttcctctacagcaagctcaccgtggacaagagcaggtggcagcaggggaacgtcttctcatgctccgtgatgcatgaggctctgcacaaccactacacgcagaagagcctctccctgtctccgggtaaatga

SEQ ID NO: 512 - protein, 741 aa, Artificial Sequence
  Synthetic polypeptide
MMYCGGNEVLCGPRVGSSGGSGGSGGLSGRSDNHGGGSQTVVTQEPSLTVSPGGTVTLTCRSSTGAVTTSNYANWVQQKPGQAPRGLIGGTNKRAPGTPARFSGSLLGGKAALTLSGVQPEDEAEYYCALWYSNLWVFGGGTKLTVLGGGGSGGGGSGGGGSEVQLVESGGGLVQPGGSLKLSCAASGFTFNTYAMNWVRQAPGKGLEWVARIRSKYNNYATYYADSVKDRFTISRDDSKNTAYLQMNNLKTEDTAVYYCVRHGNFGNSYVSWFAYWGQGTLVTVSSGGGGSQVQLKQSGPGLVQPSQSLSITCTVSGFSLTNYGVHWVRQSPGKGLEWLGVIWSGGNTDYNTPFTSRLSINKDNSKSQVFFKMNSLQSQDTAIYYCARALTYYDYEFAYWGQGTLVTVSAASTKGPSVFPLAPSSKSTSGGTAALGCLVKDYFPEPVTVSWNSGALTSGVHTFPAVLQSSGLYSLSSVVTVPSSSLGTQTYICNVNHKPSNTKVDKKVEPKSCDKTHTCPPCPAPELLGGPSVFLFPPKPKDTLMISRTPEVTCVVVDVSHEDPEVKFNWYVDGVEVHNAKTKPREEQYQSTYRVVSVLTVLHQDWLNGKEYKCKVSNKALPAPIEKTISKAKGQPREPQVYTLPPSREEMTKNQVSLTCLVKGFYPSDIAVEWESNGQPENNYKTTPPVLDSDGSFFLYSKLTVDKSRWQQGNVFSCSVMHEALHNHYTQKSLSLSPGK

SEQ ID NO: 513 - DNA, 2226 bp, Artificial Sequence
  Synthetic polynucleotide
atgatgtattgcggtgggaatgaggtgttgtgcgggccgcgggttggctcgagcggtggcagcggtggctctggtggtctgagcggccgttccgataatcatggcggcggttctcagaccgtggtcacacaggagccctcactgacagtgagccctggcgggaccgtcacactgacttgtcgcagttcaactggcgccgtgactaccagcaattacgctaactgggtccagcagaaaccaggacaggcaccacgaggactgatcggaggaactaataagagagcaccaggaacccctgcaaggttctccggatctctgctggggggaaaagccgctctgacactgagcggcgtgcagcctgaggacgaagctgagtactattgcgcactgtggtactccaacctgtgggtgtttggcgggggaactaagctgaccgtcctgggaggaggaggaagcggaggaggagggagcggaggaggaggatccgaagtgcagctggtcgagagcggaggaggactggtgcagccaggaggatccctgaagctgtcttgtgcagccagtggcttcaccttcaacacttacgcaatgaactgggtgcggcaggcacctgggaagggactggaatgggtcgcccggatcagatctaaatacaataactatgccacctactatgctgacagtgtgaaggataggttcaccatttcacgcgacgatagcaaaaacacagcttatctgcagatgaataacctgaagaccgaggatacagcagtgtactattgcgtcagacacggcaatttcgggaactcttacgtgagttggtttgcctattggggacaggggacactggtcaccgtctcctcaggaggtggtggatcccaggtgcagctgcaggagtccggaccaggactggtccggccctcacagactctgagcctgacatgcactgtgtcaggctacagcatcacctccgatcacgcctggagctgggtcaggcagccacctggacgcggcctggaatggatcggctacatttcttatagtgggatcaccacatacaacccctctctgaagagtcgagtgaccatttccagagacaactctaaaaatacactgtatctgcagatgaatagtctgcgggccgaggatacagctgtgtactattgtgcacggtctctggccagaactaccgctatggactattgggggcagggaagcctggtgaccgtcagctccgctagcaccaagggcccatcggtcttccccctggcaccctcctccaagagcacctctgggggcacagcggccctgggctgcctggtcaaggactacttccccgaaccggtgacggtgtcgtggaactcaggcgccctgaccagcggcgtgcacaccttcccggctgtcctacagtcctcaggactctactccctcagcagcgtggtgaccgtgccctccagcagcttgggcacccagacctacatctgcaacgtgaatcacaagcccagcaacaccaaggtggacaagaaagttgagcccaaatcttgtgacaaaactcacacatgcccaccgtgcccagcacctgaactcctggggggaccgtcagtcttcctcttccccccaaaacccaaggacaccctcatgatctcccggacccctgaggtcacatgcgtggtggtggacgtgagccacgaagaccctgaggtcaagttcaactggtacgtggacggcgtggaggtgcataatgccaagacaaagccgcgggaggagcagtaccagagcacgtaccgtgtggtcagcgtcctcaccgtcctgcaccaggactggctgaatggcaaggagtacaagtgcaaggtctccaacaaagccctcccagcccccatcgagaaaaccatctccaaagccaaagggcagccccgagaaccacaggtgtacaccctgcccccatcccgggaggagatgaccaagaaccaggtcagcctgacctgcctggtcaaaggcttctatcccagcgacatcgccgtggagtgggagagcaatgggcagccggagaacaactacaagaccacgcctcccgtgctggactccgacggctccttcttcctctacagcaagctcaccgtggacaagagcaggtggcagcaggggaacgtcttctcatgctccgtgatgcatgaggctctgcacaaccactacacgcagaagagcctctccctgtctccgggtaaatga

SEQ ID NO: 514 - protein, 741 aa, Artificial Sequence
  Synthetic polypeptide
MMYCGGNEVLCGPRVGSSGGSGGSGGLSGRSDNHGGGSQTVVTQEPSLTVSPGGTVTLTCRSSTGAVTTSNYANWVQQKPGQAPRGLIGGTNKRAPGTPARFSGSLLGGKAALTLSGVQPEDEAEYYCALWYSNLWVFGGGTKLTVLGGGGSGGGGSGGGGSEVQLVESGGGLVQPGGSLKLSCAASGFTFNTYAMNWVRQAPGKGLEWVARIRSKYNNYATYYADSVKDRFTISRDDSKNTAYLQMNNLKTEDTAVYYCVRHGNFGNSYVSWFAYWGQGTLVTVSSGGGGSQVQLQESGPGLVRPSQTLSLTCTVSGYSITSDHAWSWVRQPPGRGLEWIGYISYSGITTYNPSLKSRVTISRDNSKNTLYLQMNSLRAEDTAVYYCARSLARTTAMDYWGQGSLVTVSSASTKGPSVFPLAPSSKSTSGGTAALGCLVKDYFPEPVTVSWNSGALTSGVHTFPAVLQSSGLYSLSSVVTVPSSSLGTQTYICNVNHKPSNTKVDKKVEPKSCDKTHTCPPCPAPELLGGPSVFLFPPKPKDTLMISRTPEVTCVVVDVSHEDPEVKFNWYVDGVEVHNAKTKPREEQYQSTYRVVSVLTVLHQDWLNGKEYKCKVSNKALPAPIEKTISKAKGQPREPQVYTLPPSREEMTKNQVSLTCLVKGFYPSDIAVEWESNGQPENNYKTTPPVLDSDGSFFLYSKLTVDKSRWQQGNVFSCSVMHEALHNHYTQKSLSLSPGK

SEQ ID NO: 515 - DNA, 759 bp, Artificial Sequence
  Synthetic polynucleotide
tatgggtcctgcagttggaactatgtacacatattcatggattgcggctcgagcggtggcagcggtggctctggtggtctgagcggccgttccgataatcatggcggcggttctgacatccagatgactcagtctcctagctccctgtccgcctctgtgggggaccgagtcaccatcacatgcagagccagccaggatatttctagttacctgaactggtatcagcagaagcccggaaaagcacctaagctgctgatctactatacctccaggctgcactctggcgtgcccagtcggttcagtggctcagggagcggaaccgacttcacttttaccatctcaagcctgcagccagaggatattgccacatactattgtcagcagggcaatacactgccctacacttttggccaggggaccaaggtggaaatcaaacgtacggtggctgcaccatctgtcttcatcttcccgccatctgatgagcagttgaaatctggaactgcctctgttgtgtgcctgctgaataacttctatcccagagaggccaaagtacagtggaaggtggataacgccctccaatcgggtaactcccaggagagtgtcacagagcaggacagcaaggacagcacctacagcctcagcagcaccctgacgctgagcaaagcagactacgagaaacacaaagtctacgcctgcgaagtcacccatcagggcctgagctcgcccgtcacaaagagcttcaacaggggagagtgttag

SEQ ID NO: 516 - protein, 252 aa, Artificial Sequence
  Synthetic polypeptide
YGSCSWNYVHIFMDCGSSGGSGGSGGLSGRSDNHGGGSDIQMTQSPSSLSASVGDRVTITCRASQDISSYLNWYQQKPGKAPKLLIYYTSRLHSGVPSRFSGSGSGTDFTFTISSLQPEDIATYYCQQGNTLPYTFGQGTKVEIKRTVAAPSVFIFPPSDEQLKSGTASVVCLLNNFYPREAKVQWKVDNALQSGNSQESVTEQDSKDSTYSLSSTLTLSKADYEKHKVYACEVTHQGLSSPVTKSFNRGEC

SEQ ID NO: 517 - DNA, 2241 bp, Artificial Sequence
  Synthetic polynucleotide
atgatgtattgcggtgggaatgaggtgttgtgcgggccgcgggttggctcgagcggtggcagcggtggctctggtggtatctcttccggactgctgtccggcagatccgacaatcacggcggcggttctcagaccgtggtcacacaggagccctcactgacagtgagccctggcgggaccgtcacactgacttgtcgcagttcaactggcgccgtgactaccagcaattacgctaactgggtccagcagaaaccaggacaggcaccacgaggactgatcggaggaactaataagagagcaccaggaacccctgcaaggttctccggatctctgctggggggaaaagccgctctgacactgagcggcgtgcagcctgaggacgaagctgagtactattgcgcactgtggtactccaacctgtgggtgtttggcgggggaactaagctgaccgtcctgggaggaggaggaagcggaggaggagggagcggaggaggaggatccgaagtgcagctggtcgagagcggaggaggactggtgcagccaggaggatccctgaagctgtcttgtgcagccagtggcttcaccttcaacacttacgcaatgaactgggtgcggcaggcacctgggaagggactggaatgggtcgcccggatcagatctaaatacaataactatgccacctactatgctgacagtgtgaaggataggttcaccatttcacgcgacgatagcaaaaacacagcttatctgcagatgaataacctgaagaccgaggatacagcagtgtactattgcgtcagacacggcaatttcgggaactcttacgtgagttggtttgcctattggggacaggggacactggtcaccgtctcctcaggaggtggtggatcccaggtgcagctgaaacagagcggcccgggcctggtgcagccgagccagagcctgagcattacctgcaccgtgagcggctttagcctgaccaactatggcgtgcattgggtgcgccagagcccgggcaaaggcctggaatggctgggcgtgatttggagcggcggcaacaccgattataacaccccgtttaccagccgcctgagcattaacaaagataacagcaaaagccaggtgttttttaaaatgaacagcctgcaaagccaggataccgcgatttattattgcgcgcgcgcgctgacctattatgattatgaatttgcgtattggggccagggcaccctggtgaccgtgagcgcggctagcaccaagggcccatcggtcttccccctggcaccctcctccaagagcacctctgggggcacagcggccctgggctgcctggtcaaggactacttccccgaaccggtgacggtgtcgtggaactcaggcgccctgaccagcggcgtgcacaccttcccggctgtcctacagtcctcaggactctactccctcagcagcgtggtgaccgtgccctccagcagcttgggcacccagacctacatctgcaacgtgaatcacaagcccagcaacaccaaggtggacaagaaagttgagcccaaatcttgtgacaaaactcacacatgcccaccgtgcccagcacctgaactcctggggggaccgtcagtcttcctcttccccccaaaacccaaggacaccctcatgatctcccggacccctgaggtcacatgcgtggtggtggacgtgagccacgaagaccctgaggtcaagttcaactggtacgtggacggcgtggaggtgcataatgccaagacaaagccgcgggaggagcagtaccagagcacgtaccgtgtggtcagcgtcctcaccgtcctgcaccaggactggctgaatggcaaggagtacaagtgcaaggtctccaacaaagccctcccagcccccatcgagaaaaccatctccaaagccaaagggcagccccgagaaccacaggtgtacaccctgcccccatcccgggaggagatgaccaagaaccaggtcagcctgacctgcctggtcaaaggcttctatcccagcgacatcgccgtggagtgggagagcaatgggcagccggagaacaactacaagaccacgcctcccgtgctggactccgacggctccttcttcctctacagcaagctcaccgtggacaagagcaggtggcagcaggggaacgtcttctcatgctccgtgatgcatgaggctctgcacaaccactacacgcagaagagcctctccctgtctccgggtaaatga

SEQ ID NO: 518 - protein, 746 aa, Artificial Sequence
  Synthetic polypeptide
MMYCGGNEVLCGPRVGSSGGSGGSGGISSGLLSGRSDNHGGGSQTVVTQEPSLTVSPGGTVTLTCRSSTGAVTTSNYANWVQQKPGQAPRGLIGGTNKRAPGTPARFSGSLLGGKAALTLSGVQPEDEAEYYCALWYSNLWVFGGGTKLTVLGGGGSGGGGSGGGGSEVQLVESGGGLVQPGGSLKLSCAASGFTFNTYAMNWVRQAPGKGLEWVARIRSKYNNYATYYADSVKDRFTISRDDSKNTAYLQMNNLKTEDTAVYYCVRHGNFGNSYVSWFAYWGQGTLVTVSSGGGGSQVQLKQSGPGLVQPSQSLSITCTVSGFSLTNYGVHWVRQSPGKGLEWLGVIWSGGNTDYNTPFTSRLSINKDNSKSQVFFKMNSLQSQDTAIYYCARALTYYDYEFAYWGQGTLVTVSAASTKGPSVFPLAPSSKSTSGGTAALGCLVKDYFPEPVTVSWNSGALTSGVHTFPAVLQSSGLYSLSSVVTVPSSSLGTQTYICNVNHKPSNTKVDKKVEPKSCDKTHTCPPCPAPELLGGPSVFLFPPKPKDTLMISRTPEVTCVVVDVSHEDPEVKFNWYVDGVEVHNAKTKPREEQYQSTYRVVSVLTVLHQDWLNGKEYKCKVSNKALPAPIEKTISKAKGQPREPQVYTLPPSREEMTKNQVSLTCLVKGFYPSDIAVEWESNGQPENNYKTTPPVLDSDGSFFLYSKLTVDKSRWQQGNVFSCSVMHEALHNHYTQKSLSLSPGK

SEQ ID NO: 519 - DNA, 783 bp, Artificial Sequence
  Synthetic polynucleotide
tgcatctcacctcgtggttgtccggacggcccatacgtcatgtacggctcgagcggtggcagcggtggctctggtggatccggtattagcagtggtctgttaagcggtcgtagcgataatcatggcagtagcggtacccagatcttgctgacccagagcccggtgattctgagcgtgagcccgggcgaacgtgtgagctttagctgccgcgcgagccagagcattggcaccaacattcattggtatcagcagcgcaccaacggcagcccgcgcctgctgattaaatatgcgagcgaaagcattagcggcattccgagccgctttagcggcagcggcagcggcaccgattttaccctgagcattaacagcgtggaaagcgaagatattgcggattattattgccagcagaacaacaactggccgaccacctttggcgcgggcaccaaactggaactgaaacgtacggtggctgcaccatctgtcttcatcttcccgccatctgatgagcagttgaaatctggaactgcctctgttgtgtgcctgctgaataacttctatcccagagaggccaaagtacagtggaaggtggataacgccctccaatcgggtaactcccaggagagtgtcacagagcaggacagcaaggacagcacctacagcctcagcagcaccctgacgctgagcaaagcagactacgagaaacacaaagtctacgcctgcgaagtcacccatcagggcctgagctcgcccgtcacaaagagcttcaacaggggagagtgttag

SEQ ID NO: 520 - protein, 260 aa, Artificial Sequence
  Synthetic polypeptide
CISPRGCPDGPYVMYGSSGGSGGSGGSGISSGLLSGRSDNHGSSGTQILLTQSPVILSVSPGERVSFSCRASQSIGTNIHWYQQRTNGSPRLLIKYASESISGIPSRFSGSGSGTDFTLSINSVESEDIADYYCQQNNNWPTTFGAGTKLELKRTVAAPSVFIFPPSDEQLKSGTASVVCLLNNFYPREAKVQWKVDNALQSGNSQESVTEQDSKDSTYSLSSTLTLSKADYEKHKVYACEVTHQGLSSPVTKSFNRGEC

SEQ ID NO: 521 - DNA, 2232 bp, Artificial Sequence
  Synthetic polynucleotide
gcttgctctgatatggtttattggggttcgtgcagttggttgggaggtggctcgagcggtggcagcggtggctctggtggtattagcagtggtctgttaagcggtcgtagcgataatcatggcggcggttctgaagtgcagctggtggaatctgggggcggactggtgcagcctggcaagtctctgaagctgagctgcgaggccagcggcttcacctttagcggctacggcatgcactgggtgcgccaggcacctggcagaggcctggaaagcgtggcctacatcaccagcagcagcatcaacattaagtacgccgacgccgtgaagggccggttcaccgtgtccagagacaacgccaagaacctgctgttcctgcagatgaacatcctgaagtccgaggacaccgccatgtactactgcgccagattcgactgggacaagaactactggggccagggcacaatggtcacagtgtccagcggtggaggtggtagtggtggaggaagtggaggttcaggaggtggaagcggtggtggtggtagtgacatccagatgacccagagccccagcagcctgcctgcctctctgggcgatagagtgaccatcaactgccaggccagccaggacatcagcaactacctgaactggtatcagcagaagcccggcaaggcccccaagctgctgatctactacaccaacaagctggccgacggtgtgcccagcagattcagcggcagcggtagcggcagagacagcagcttcaccatcagctccctggaatccgaggatatcggcagctactactgccagcagtactacaactacccctggaccttcggccctggcaccaagctggaaatcaaaagaggaggtggtggatcccaggtgcagctgaaacagagcggcccgggcctggtgcagccgagccagagcctgagcattacctgcaccgtgagcggctttagcctgaccaactatggcgtgcattgggtgcgccagagcccgggcaaaggcctggaatggctgggcgtgatttggagcggcggcaacaccgattataacaccccgtttaccagccgcctgagcattaacaaagataacagcaaaagccaggtgttttttaaaatgaacagcctgcaaagccaggataccgcgatttattattgcgcgcgcgcgctgacctattatgattatgaatttgcgtattggggccagggcaccctggtgaccgtgagcgcggctagcaccaagggcccatcggtcttccccctggcaccctcctccaagagcacctctgggggcacagcggccctgggctgcctggtcaaggactacttccccgaaccggtgacggtgtcgtggaactcaggcgccctgaccagcggcgtgcacaccttcccggctgtcctacagtcctcaggactctactccctcagcagcgtggtgaccgtgccctccagcagcttgggcacccagacctacatctgcaacgtgaatcacaagcccagcaacaccaaggtggacaagaaagttgagcccaaatcttgtgacaaaactcacacatgcccaccgtgcccagcacctgaactcctggggggaccgtcagtcttcctcttccccccaaaacccaaggacaccctcatgatctcccggacccctgaggtcacatgcgtggtggtggacgtgagccacgaagaccctgaggtcaagttcaactggtacgtggacggcgtggaggtgcataatgccaagacaaagccgcgggaggagcagtaccagagcacgtaccgtgtggtcagcgtcctcaccgtcctgcaccaggactggctgaatggcaaggagtacaagtgcaaggtctccaacaaagccctcccagcccccatcgagaaaaccatctccaaagccaaagggcagccccgagaaccacaggtgtacaccctgcccccatcccgggaggagatgaccaagaaccaggtcagcctgacctgcctggtcaaaggcttctatcccagcgacatcgccgtggagtgggagagcaatgggcagccggagaacaactacaagaccacgcctcccgtgctggactccgacggctccttcttcctctacagcaagctcaccgtggacaagagcaggtggcagcaggggaacgtcttctcatgctccgtgatgcatgaggctctgcacaaccactacacgcagaagagcctctccctgtctccgggtaaatga

SEQ ID NO: 522 - DNA, 2226 bp, Artificial Sequence
  Synthetic polynucleotide
ggttatcggtggggttgcgagtggaattgcggtgggattactactggctcgagcggtggcagcggtggctctggtggtctgagcggccgttccgataatcatggcggcggttctgaggtgcagctggtcgagtctggaggaggattggtgcagcctggagggtcattgaaactctcatgtgcagcctctggattcaccttcaataagtacgccatgaactgggtccgccaggctccaggaaagggtttggaatgggttgctcgcataagaagtaaatataataattatgcaacatattatgccgattcagtgaaagacaggttcaccatctccagagatgattcaaaaaacactgcctatctacaaatgaacaacttgaaaactgaggacactgccgtgtactactgtgtgagacatgggaacttcggtaatagctacatatcctactgggcttactggggccaagggactctggtcaccgtctcctcaggtggtggtggttctggcggcggcggctccggtggtggtggttctcagactgttgtgactcaggaaccttcactcaccgtatcacctggtggaacagtcacactcacttgtggctcctcgactggggctgttacatctggctactacccaaactgggtccaacaaaaaccaggtcaggcaccccgtggtctaataggtgggactaagttcctcgcccccggtactcctgccagattctcaggctccctgcttggaggcaaggctgccctcaccctctcaggggtacagccagaggatgaggcagaatattactgtgctctatggtacagcaaccgctgggtgttcggtggaggaaccaaactgactgtcctaggaggtggtggatcccaggtgcagctgaaacagagcggcccgggcctggtgcagccgagccagagcctgagcattacctgcaccgtgagcggctttagcctgaccaactatggcgtgcattgggtgcgccagagcccgggcaaaggcctggaatggctgggcgtgatttggagcggcggcaacaccgattataacaccccgtttaccagccgcctgagcattaacaaagataacagcaaaagccaggtgttttttaaaatgaacagcctgcaaagccaggataccgcgatttattattgcgcgcgcgcgctgacctattatgattatgaatttgcgtattggggccagggcaccctggtgaccgtgagcgcggctagcaccaagggcccatcggtcttccccctggcaccctcctccaagagcacctctgggggcacagcggccctgggctgcctggtcaaggactacttccccgaaccggtgacggtgtcgtggaactcaggcgccctgaccagcggcgtgcacaccttcccggctgtcctacagtcctcaggactctactccctcagcagcgtggtgaccgtgccctccagcagcttgggcacccagacctacatctgcaacgtgaatcacaagcccagcaacaccaaggtggacaagaaagttgagcccaaatcttgtgacaaaactcacacatgcccaccgtgcccagcacctgaactcctggggggaccgtcagtcttcctcttccccccaaaacccaaggacaccctcatgatctcccggacccctgaggtcacatgcgtggtggtggacgtgagccacgaagaccctgaggtcaagttcaactggtacgtggacggcgtggaggtgcataatgccaagacaaagccgcgggaggagcagtaccagagcacgtaccgtgtggtcagcgtcctcaccgtcctgcaccaggactggctgaatggcaaggagtacaagtgcaaggtctccaacaaagccctcccagcccccatcgagaaaaccatctccaaagccaaagggcagccccgagaaccacaggtgtacaccctgcccccatcccgggaggagatgaccaagaaccaggtcagcctgacctgcctggtcaaaggcttctatcccagcgacatcgccgtggagtgggagagcaatgggcagccggagaacaactacaagaccacgcctcccgtgctggactccgacggctccttcttcctctacagcaagctcaccgtggacaagagcaggtggcagcaggggaacgtcttctcatgctccgtgatgcatgaggctctgcacaaccactacacgcagaagagcctctccctgtctccgggtaaatga

SEQ ID NO: 523 - protein, 449 aa, Artificial Sequence; identical to SEQ ID NO: 456
  Synthetic polypeptide

SEQ ID NO: 524 - protein, 741 aa, Artificial Sequence
  Synthetic polypeptide
GYRWGCEWNCGGITTGSSGGSGGSGGLSGRSDNHGGGSEVQLVESGGGLVQPGGSLKLSCAASGFTFNKYAMNWVRQAPGKGLEWVARIRSKYNNYATYYADSVKDRFTISRDDSKNTAYLQMNNLKTEDTAVYYCVRHGNFGNSYISYWAYWGQGTLVTVSSGGGGSGGGGSGGGGSQTVVTQEPSLTVSPGGTVTLTCGSSTGAVTSGYYPNWVQQKPGQAPRGLIGGTKFLAPGTPARFSGSLLGGKAALTLSGVQPEDEAEYYCALWYSNRWVFGGGTKLTVLGGGGSQVQLKQSGPGLVQPSQSLSITCTVSGFSLTNYGVHWVRQSPGKGLEWLGVIWSGGNTDYNTPFTSRLSINKDNSKSQVFFKMNSLQSQDTAIYYCARALTYYDYEFAYWGQGTLVTVSAASTKGPSVFPLAPSSKSTSGGTAALGCLVKDYFPEPVTVSWNSGALTSGVHTFPAVLQSSGLYSLSSVVTVPSSSLGTQTYICNVNHKPSNTKVDKKVEPKSCDKTHTCPPCPAPELLGGPSVFLFPPKPKDTLMISRTPEVTCVVVDVSHEDPEVKFNWYVDGVEVHNAKTKPREEQYQSTYRVVSVLTVLHQDWLNGKEYKCKVSNKALPAPIEKTISKAKGQPREPQVYTLPPSREEMTKNQVSLTCLVKGFYPSDIAVEWESNGQPENNYKTTPPVLDSDGSFFLYSKLTVDKSRWQQGNVFSCSVMHEALHNHYTQKSLSLSPGK

SEQ ID NO: 525 - DNA, 2226 bp, Artificial Sequence
  Synthetic polynucleotide
atgatgtattgcggtgggaatgaggtgttgtgcgggccgcgggttggctcgagcggtggcagcggtggctctggtggtctgagcggccgttccgataatcatggcggcggttctgaggtgcagctggtcgagtctggaggaggattggtgcagcctggagggtcattgaaactctcatgtgcagcctctggattcaccttcaataagtacgccatgaactgggtccgccaggctccaggaaagggtttggaatgggttgctcgcataagaagtaaatataataattatgcaacatattatgccgattcagtgaaagacaggttcaccatctccagagatgattcaaaaaacactgcctatctacaaatgaacaacttgaaaactgaggacactgccgtgtactactgtgtgagacatgggaacttcggtaatagctacatatcctactgggcttactggggccaagggactctggtcaccgtctcctcaggtggtggtggttctggcggcggcggctccggtggtggtggttctcagactgttgtgactcaggaaccttcactcaccgtatcacctggtggaacagtcacactcacttgtggctcctcgactggggctgttacatctggctactacccaaactgggtccaacaaaaaccaggtcaggcaccccgtggtctaataggtgggactaagttcctcgcccccggtactcctgccagattctcaggctccctgcttggaggcaaggctgccctcaccctctcaggggtacagccagaggatgaggcagaatattactgtgctctatggtacagcaaccgctgggtgttcggtggaggaaccaaactgactgtcctaggaggtggtggatcccaggtgcagctgaaacagagcggcccgggcctggtgcagccgagccagagcctgagcattacctgcaccgtgagcggctttagcctgaccaactatggcgtgcattgggtgcgccagagcccgggcaaaggcctggaatggctgggcgtgatttggagcggcggcaacaccgattataacaccccgtttaccagccgcctgagcattaacaaagataacagcaaaagccaggtgttttttaaaatgaacagcctgcaaagccaggataccgcgatttattattgcgcgcgcgcgctgacctattatgattatgaatttgcgtattggggccagggcaccctggtgaccgtgagcgcggctagcaccaagggcccatcggtcttccccctggcaccctcctccaagagcacctctgggggcacagcggccctgggctgcctggtcaaggactacttccccgaaccggtgacggtgtcgtggaactcaggcgccctgaccagcggcgtgcacaccttcccggctgtcctacagtcctcaggactctactccctcagcagcgtggtgaccgtgccctccagcagcttgggcacccagacctacatctgcaacgtgaatcacaagcccagcaacaccaaggtggacaagaaagttgagcccaaatcttgtgacaaaactcacacatgcccaccgtgcccagcacctgaactcctggggggaccgtcagtcttcctcttccccccaaaacccaaggacaccctcatgatctcccggacccctgaggtcacatgcgtggtggtggacgtgagccacgaagaccctgaggtcaagttcaactggtacgtggacggcgtggaggtgcataatgccaagacaaagccgcgggaggagcagtaccagagcacgtaccgtgtggtcagcgtcctcaccgtcctgcaccaggactggctgaatggcaaggagtacaagtgcaaggtctccaacaaagccctcccagcccccatcgagaaaaccatctccaaagccaaagggcagccccgagaaccacaggtgtacaccctgcccccatcccgggaggagatgaccaagaaccaggtcagcctgacctgcctggtcaaaggcttctatcccagcgacatcgccgtggagtgggagagcaatgggcagccggagaacaactacaagaccacgcctcccgtgctggactccgacggctccttcttcctctacagcaagctcaccgtggacaagagcaggtggcagcaggggaacgtcttctcatgctccgtgatgcatgaggctctgcacaaccactacacgcagaagagcctctccctgtctccgggtaaatga

SEQ ID NO: 526 - protein, 741 aa, Artificial Sequence
  Synthetic polypeptide
MMYCGGNEVLCGPRVGSSGGSGGSGGLSGRSDNHGGGSEVQLVESGGGLVQPGGSLKLSCAASGFTFNKYAMNWVRQAPGKGLEWVARIRSKYNNYATYYADSVKDRFTISRDDSKNTAYLQMNNLKTEDTAVYYCVRHGNFGNSYISYWAYWGQGTLVTVSSGGGGSGGGGSGGGGSQTVVTQEPSLTVSPGGTVTLTCGSSTGAVTSGYYPNWVQQKPGQAPRGLIGGTKFLAPGTPARFSGSLLGGKAALTLSGVQPEDEAEYYCALWYSNRWVFGGGTKLTVLGGGGSQVQLKQSGPGLVQPSQSLSITCTVSGFSLTNYGVHWVRQSPGKGLEWLGVIWSGGNTDYNTPFTSRLSINKDNSKSQVFFKMNSLQSQDTAIYYCARALTYYDYEFAYWGQGTLVTVSAASTKGPSVFPLAPSSKSTSGGTAALGCLVKDYFPEPVTVSWNSGALTSGVHTFPAVLQSSGLYSLSSVVTVPSSSLGTQTYICNVNHKPSNTKVDKKVEPKSCDKTHTCPPCPAPELLGGPSVFLFPPKPKDTLMISRTPEVTCVVVDVSHEDPEVKFNWYVDGVEVHNAKTKPREEQYQSTYRVVSVLTVLHQDWLNGKEYKCKVSNKALPAPIEKTISKAKGQPREPQVYTLPPSREEMTKNQVSLTCLVKGFYPSDIAVEWESNGQPENNYKTTPPVLDSDGSFFLYSKLTVDKSRWQQGNVFSCSVMHEALHNHYTQKSLSLSPGK

SEQ ID NO: 527 - DNA, 759 bp, Artificial Sequence
  Synthetic polynucleotide
tatgggtcctgcagttggaactatgtacacatattcatggattgcggctcgagcggtggcagcggtggctctggtggctcaggtggaggctcgggcggtgggagcggcggttctgacatccagatgactcagtctcctagctccctgtccgcctctgtgggggaccgagtcaccatcacatgcagagccagccaggatatttctagttacctgaactggtatcagcagaagcccggaaaagcacctaagctgctgatctactatacctccaggctgcactctggcgtgcccagtcggttcagtggctcagggagcggaaccgacttcacttttaccatctcaagcctgcagccagaggatattgccacatactattgtcagcagggcaatacactgccctacacttttggccaggggaccaaggtggaaatcaaacgtacggtggctgcaccatctgtcttcatcttcccgccatctgatgagcagttgaaatctggaactgcctctgttgtgtgcctgctgaataacttctatcccagagaggccaaagtacagtggaaggtggataacgccctccaatcgggtaactcccaggagagtgtcacagagcaggacagcaaggacagcacctacagcctcagcagcaccctgacgctgagcaaagcagactacgagaaacacaaagtctacgcctgcgaagtcacccatcagggcctgagctcgcccgtcacaaagagcttcaacaggggagagtgttag

SEQ ID NO: 528 - protein, 252 aa, Artificial Sequence
  Synthetic polypeptide
YGSCSWNYVHIFMDCGSSGGSGGSGGSGGGSGGGSGGSDIQMTQSPSSLSASVGDRVTITCRASQDISSYLNWYQQKPGKAPKLLIYYTSRLHSGVPSRFSGSGSGTDFTFTISSLQPEDIATYYCQQGNTLPYTFGQGTKVEIKRTVAAPSVFIFPPSDEQLKSGTASVVCLLNNFYPREAKVQWKVDNALQSGNSQESVTEQDSKDSTYSLSSTLTLSKADYEKHKVYACEVTHQGLSSPVTKSFNRGEC

SEQ ID NO: 529 - DNA, 2226 bp, Artificial Sequence
  Synthetic polynucleotide
atgatgtattgcggtgggaatgaggtgttgtgcgggccgcgggttggctcgagcggtggcagcggtggctctggtggtggtggaggctcgggcggtgggagcggcggcggttctcagaccgtggtcacacaggagccctcactgacagtgagccctggcgggaccgtcacactgacttgtcgcagttcaactggcgccgtgactaccagcaattacgctaactgggtccagcagaaaccaggacaggcaccacgaggactgatcggaggaactaataagagagcaccaggaacccctgcaaggttctccggatctctgctggggggaaaagccgctctgacactgagcggcgtgcagcctgaggacgaagctgagtactattgcgcactgtggtactccaacctgtgggtgtttggcgggggaactaagctgaccgtcctgggaggaggaggaagcggaggaggagggagcggaggaggaggatccgaagtgcagctggtcgagagcggaggaggactggtgcagccaggaggatccctgaagctgtcttgtgcagccagtggcttcaccttcaacacttacgcaatgaactgggtgcggcaggcacctgggaagggactggaatgggtcgcccggatcagatctaaatacaataactatgccacctactatgctgacagtgtgaaggataggttcaccatttcacgcgacgatagcaaaaacacagcttatctgcagatgaataacctgaagaccgaggatacagcagtgtactattgcgtcagacacggcaatttcgggaactcttacgtgagttggtttgcctattggggacaggggacactggtcaccgtctcctcaggaggtggtggatcccaggtgcagctgcaggagtccggaccaggactggtccggccctcacagactctgagcctgacatgcactgtgtcaggctacagcatcacctccgatcacgcctggagctgggtcaggcagccacctggacgcggcctggaatggatcggctacatttcttatagtgggatcaccacatacaacccctctctgaagagtcgagtgaccatttccagagacaactctaaaaatacactgtatctgcagatgaatagtctgcgggccgaggatacagctgtgtactattgtgcacggtctctggccagaactaccgctatggactattgggggcagggaagcctggtgaccgtcagctccgctagcaccaagggcccatcggtcttccccctggcaccctcctccaagagcacctctgggggcacagcggccctgggctgcctggtcaaggactacttccccgaaccggtgacggtgtcgtggaactcaggcgccctgaccagcggcgtgcacaccttcccggctgtcctacagtcctcaggactctactccctcagcagcgtggtgaccgtgccctccagcagcttgggcacccagacctacatctgcaacgtgaatcacaagcccagcaacaccaaggtggacaagaaagttgagcccaaatcttgtgacaaaactcacacatgcccaccgtgcccagcacctgaactcctggggggaccgtcagtcttcctcttccccccaaaacccaaggacaccctcatgatctcccggacccctgaggtcacatgcgtggtggtggacgtgagccacgaagaccctgaggtcaagttcaactggtacgtggacggcgtggaggtgcataatgccaagacaaagccgcgggaggagcagtaccagagcacgtaccgtgtggtcagcgtcctcaccgtcctgcaccaggactggctgaatggcaaggagtacaagtgcaaggtctccaacaaagccctcccagcccccatcgagaaaaccatctccaaagccaaagggcagccccgagaaccacaggtgtacaccctgcccccatcccgggaggagatgaccaagaaccaggtcagcctgacctgcctggtcaaaggcttctatcccagcgacatcgccgtggagtgggagagcaatgggcagccggagaacaactacaagaccacgcctcccgtgctggactccgacggctccttcttcctctacagcaagctcaccgtggacaagagcaggtggcagcaggggaacgtcttctcatgctccgtgatgcatgaggctctgcacaaccactacacgcagaagagcctctccctgtctccgggtaaatga

SEQ ID NO: 530 - protein, 741 aa, Artificial Sequence
  Synthetic polypeptide
MMYCGGNEVLCGPRVGSSGGSGGSGGGGGSGGGSGGGSQTVVTQEPSLTVSPGGTVTLTCRSSTGAVTTSNYANWVQQKPGQAPRGLIGGTNKRAPGTPARFSGSLLGGKAALTLSGVQPEDEAEYYCALWYSNLWVFGGGTKLTVLGGGGSGGGGSGGGGSEVQLVESGGGLVQPGGSLKLSCAASGFTFNTYAMNWVRQAPGKGLEWVARIRSKYNNYATYYADSVKDRFTISRDDSKNTAYLQMNNLKTEDTAVYYCVRHGNFGNSYVSWFAYWGQGTLVTVSSGGGGSQVQLQESGPGLVRPSQTLSLTCTVSGYSITSDHAWSWVRQPPGRGLEWIGYISYSGITTYNPSLKSRVTISRDNSKNTLYLQMNSLRAEDTAVYYCARSLARTTAMDYWGQGSLVTVSSASTKGPSVFPLAPSSKSTSGGTAALGCLVKDYFPEPVTVSWNSGALTSGVHTFPAVLQSSGLYSLSSVVTVPSSSLGTQTYICNVNHKPSNTKVDKKVEPKSCDKTHTCPPCPAPELLGGPSVFLFPPKPKDTLMISRTPEVTCVVVDVSHEDPEVKFNWYVDGVEVHNAKTKPREEQYQSTYRVVSVLTVLHQDWLNGKEYKCKVSNKALPAPIEKTISKAKGQPREPQVYTLPPSREEMTKNQVSLTCLVKGFYPSDIAVEWESNGQPENNYKTTPPVLDSDGSFFLYSKLTVDKSRWQQGNVFSCSVMHEALHNHYTQKSLSLSPGK

SEQ ID NO: 531 - DNA, 2235 bp, Artificial Sequence
  Synthetic polynucleotide
ttgcatcctatgtgccatcctgagggtctgtgcaagtttactcctggaggtggctcgagcggtggcagcggtggctctggtggtattagcagtggtctgttaagcggtcgtagcgataatcatggcggcggttctgaagtgcagctggtggaatctgggggcggactggtgcagcctggcaagtctctgaagctgagctgcgaggccagcggcttcacctttagcggctacggcatgcactgggtgcgccaggcacctggcagaggcctggaaagcgtggcctacatcaccagcagcagcatcaacattaagtacgccgacgccgtgaagggccggttcaccgtgtccagagacaacgccaagaacctgctgttcctgcagatgaacatcctgaagtccgaggacaccgccatgtactactgcgccagattcgactgggacaagaactactggggccagggcacaatggtcacagtgtccagcggtggaggtggtagtggtggaggaagtggaggttcaggaggtggaagcggtggtggtggtagtgacatccagatgacccagagccccagcagcctgcctgcctctctgggcgatagagtgaccatcaactgccaggccagccaggacatcagcaactacctgaactggtatcagcagaagcccggcaaggcccccaagctgctgatctactacaccaacaagctggccgacggtgtgcccagcagattcagcggcagcggtagcggcagagacagcagcttcaccatcagctccctggaatccgaggatatcggcagctactactgccagcagtactacaactacccctggaccttcggccctggcaccaagctggaaatcaaaagaggaggtggtggatcccaggtgcagctgaaacagagcggcccgggcctggtgcagccgagccagagcctgagcattacctgcaccgtgagcggctttagcctgaccaactatggcgtgcattgggtgcgccagagcccgggcaaaggcctggaatggctgggcgtgatttggagcggcggcaacaccgattataacaccccgtttaccagccgcctgagcattaacaaagataacagcaaaagccaggtgttttttaaaatgaacagcctgcaaagccaggataccgcgatttattattgcgcgcgcgcgctgacctattatgattatgaatttgcgtattggggccagggcaccctggtgaccgtgagcgcggctagcaccaagggcccatcggtcttccccctggcaccctcctccaagagcacctctgggggcacagcggccctgggctgcctggtcaaggactacttccccgaaccggtgacggtgtcgtggaactcaggcgccctgaccagcggcgtgcacaccttcccggctgtcctacagtcctcaggactctactccctcagcagcgtggtgaccgtgccctccagcagcttgggcacccagacctacatctgcaacgtgaatcacaagcccagcaacaccaaggtggacaagaaagttgagcccaaatcttgtgacaaaactcacacatgcccaccgtgcccagcacctgaactcctggggggaccgtcagtcttcctcttccccccaaaacccaaggacaccctcatgatctcccggacccctgaggtcacatgcgtggtggtggacgtgagccacgaagaccctgaggtcaagttcaactggtacgtggacggcgtggaggtgcataatgccaagacaaagccgcgggaggagcagtaccagagcacgtaccgtgtggtcagcgtcctcaccgtcctgcaccaggactggctgaatggcaaggagtacaagtgcaaggtctccaacaaagccctcccagcccccatcgagaaaaccatctccaaagccaaagggcagccccgagaaccacaggtgtacaccctgcccccatcccgggaggagatgaccaagaaccaggtcagcctgacctgcctggtcaaaggcttctatcccagcgacatcgccgtggagtgggagagcaatgggcagccggagaacaactacaagaccacgcctcccgtgctggactccgacggctccttcttcctctacagcaagctcaccgtggacaagagcaggtggcagcaggggaacgtcttctcatgctccgtgatgcatgaggctctgcacaaccactacacgcagaagagcctctccctgtctccgggtaaatga

SEQ ID NO: 532 - protein, 744 aa, Artificial Sequence
  Synthetic polypeptide
LHPMCHPEGLCKFTPGGGSSGGSGGSGGISSGLLSGRSDNHGGGSEVQLVESGGGLVQPGKSLKLSCEASGFTFSGYGMHWVRQAPGRGLESVAYITSSSINIKYADAVKGRFTVSRDNAKNLLFLQMNILKSEDTAMYYCARFDWDKNYWGQGTMVTVSSGGGGSGGGSGGSGGGSGGGGSDIQMTQSPSSLPASLGDRVTINCQASQDISNYLNWYQQKPGKAPKLLIYYTNKLADGVPSRFSGSGSGRDSSFTISSLESEDIGSYYCQQYYNYPWTFGPGTKLEIKRGGGGSQVQLKQSGPGLVQPSQSLSITCTVSGFSLTNYGVHWVRQSPGKGLEWLGVIWSGGNTDYNTPFTSRLSINKDNSKSQVFFKMNSLQSQDTAIYYCARALTYYDYEFAYWGQGTLVTVSAASTKGPSVFPLAPSSKSTSGGTAALGCLVKDYFPEPVTVSWNSGALTSGVHTFPAVLQSSGLYSLSSVVTVPSSSLGTQTYICNVNHKPSNTKVDKKVEPKSCDKTHTCPPCPAPELLGGPSVFLFPPKPKDTLMISRTPEVTCVVVDVSHEDPEVKFNWYVDGVEVHNAKTKPREEQYQSTYRVVSVLTVLHQDWLNGKEYKCKVSNKALPAPIEKTISKAKGQPREPQVYTLPPSREEMTKNQVSLTCLVKGFYPSDIAVEWESNGQPENNYKTTPPVLDSDGSFFLYSKLTVDKSRWQQGNVFSCSVMHEALHNHYTQKSLSLSPGK

SEQ ID NO: 533 - DNA, 2232 bp, Artificial Sequence; identical to SEQ ID NO: 521
  Synthetic polynucleotide

SEQ ID NO: 534 - protein, 744 aa, Artificial Sequence
  Synthetic polypeptide
ACSDMVYWGSCSWLGGGSSGGSGGSGGISSGLLSGRSDNHGGGSEVQLVESGGGLVQPGKSLKLSCEASGFTFSGYGMHWVRQAPGRGLESVAYITSSSINIKYADAVKGRFTVSRDNAKNLLFLQMNILKSEDTAMYYCARFDWDKNYWGQGTMVTVSSGGGGSGGGSGGSGGGSGGGGSDIQMTQSPSSLPASLGDRVTINCQASQDISNYLNWYQQKPGKAPKLLIYYTNKLADGVPSRFSGSGSGRDSSFTISSLESEDIGSYYCQQYYNYPWTFGPGTKLEIKRGGGGSQVQLKQSGPGLVQPSQSLSITCTVSGFSLTNYGVHWVRQSPGKGLEWLGVIWSGGNTDYNTPFTSRLSINKDNSKSQVFFKMNSLQSQDTAIYYCARALTYYDYEFAYWGQGTLVTVSAASTKGPSVFPLAPSSKSTSGGTAALGCLVKDYFPEPVTVSWNSGALTSGVHTFPAVLQSSGLYSLSSVVTVPSSSLGTQTYICNVNHKPSNTKVDKKVEPKSCDKTHTCPPCPAPELLGGPSVFLFPPKPKDTLMISRTPEVTCVVVDVSHEDPEVKFNWYVDGVEVHNAKTKPREEQYQSTYRVVSVLTVLHQDWLNGKEYKCKVSNKALPAPIEKTISKAKGQPREPQVYTLPPSREEMTKNQVSLTCLVKGFYPSDIAVEWESNGQPENNYKTTPPVLDSDGSFFLYSKLTVDKSRWQQGNVFSCSVMHEALHNHYTQKSLSLSPGKV

SEQ ID NO: 535 - DNA, 2235 bp, Artificial Sequence
  Synthetic polynucleotide
gattgcattggattggatcattattttcttggaccgtgcagttctggaggtggctcgagcggtggcagcggtggctctggtggtattagcagtggtctgttaagcggtcgtagcgataatcatggcggcggttctgaagtgcagctggtggaatctgggggcggactggtgcagcctggcaagtctctgaagctgagctgcgaggccagcggcttcacctttagcggctacggcatgcactgggtgcgccaggcacctggcagaggcctggaaagcgtggcctacatcaccagcagcagcatcaacattaagtacgccgacgccgtgaagggccggttcaccgtgtccagagacaacgccaagaacctgctgttcctgcagatgaacatcctgaagtccgaggacaccgccatgtactactgcgccagattcgactgggacaagaactactggggccagggcacaatggtcacagtgtccagcggtggaggtggtagtggtggaggaagtggaggttcaggaggtggaagcggtggtggtggtagtgacatccagatgacccagagccccagcagcctgcctgcctctctgggcgatagagtgaccatcaactgccaggccagccaggacatcagcaactacctgaactggtatcagcagaagcccggcaaggcccccaagctgctgatctactacaccaacaagctggccgacggtgtgcccagcagattcagcggcagcggtagcggcagagacagcagcttcaccatcagctccctggaatccgaggatatcggcagctactactgccagcagtactacaactacccctggaccttcggccctggcaccaagctggaaatcaaaagaggaggtggtggatcccaggtgcagctgaaacagagcggcccgggcctggtgcagccgagccagagcctgagcattacctgcaccgtgagcggctttagcctgaccaactatggcgtgcattgggtgcgccagagcccgggcaaaggcctggaatggctgggcgtgatttggagcggcggcaacaccgattataacaccccgtttaccagccgcctgagcattaacaaagataacagcaaaagccaggtgttttttaaaatgaacagcctgcaaagccaggataccgcgatttattattgcgcgcgcgcgctgacctattatgattatgaatttgcgtattggggccagggcaccctggtgaccgtgagcgcggctagcaccaagggcccatcggtcttccccctggcaccctcctccaagagcacctctgggggcacagcggccctgggctgcctggtcaaggactacttccccgaaccggtgacggtgtcgtggaactcaggcgccctgaccagcggcgtgcacaccttcccggctgtcctacagtcctcaggactctactccctcagcagcgtggtgaccgtgccctccagcagcttgggcacccagacctacatctgcaacgtgaatcacaagcccagcaacaccaaggtggacaagaaagttgagcccaaatcttgtgacaaaactcacacatgcccaccgtgcccagcacctgaactcctggggggaccgtcagtcttcctcttccccccaaaacccaaggacaccctcatgatctcccggacccctgaggtcacatgcgtggtggtggacgtgagccacgaagaccctgaggtcaagttcaactggtacgtggacggcgtggaggtgcataatgccaagacaaagccgcgggaggagcagtaccagagcacgtaccgtgtggtcagcgtcctcaccgtcctgcaccaggactggctgaatggcaaggagtacaagtgcaaggtctccaacaaagccctcccagcccccatcgagaaaaccatctccaaagccaaagggcagccccgagaaccacaggtgtacaccctgcccccatcccgggaggagatgaccaagaaccaggtcagcctgacctgcctggtcaaaggcttctatcccagcgacatcgccgtggagtgggagagcaatgggcagccggagaacaactacaagaccacgcctcccgtgctggactccgacggctccttcttcctctacagcaagctcaccgtggacaagagcaggtggcagcaggggaacgtcttctcatgctccgtgatgcatgaggctctgcacaaccactacacgcagaagagcctctccctgtctccgggtaaatga

SEQ ID NO: 536 - protein, 744 aa, Artificial Sequence
  Synthetic polypeptide
DCIGLDHYFLGPCSSGGGSSGGSGGSGGISSGLLSGRSDNHGGGSEVQLVESGGGLVQPGKSLKLSCEASGFTFSGYGMHWVRQAPGRGLESVAYITSSSINIKYADAVKGRFTVSRDNAKNLLFLQMNILKSEDTAMYYCARFDWDKNYWGQGTMVTVSSGGGGSGGGSGGSGGGSGGGGSDIQMTQSPSSLPASLGDRVTINCQASQDISNYLNWYQQKPGKAPKLLIYYTNKLADGVPSRFSGSGSGRDSSFTISSLESEDIGSYYCQQYYNYPWTFGPGTKLEIKRGGGGSQVQLKQSGPGLVQPSQSLSITCTVSGFSLTNYGVHWVRQSPGKGLEWLGVIWSGGNTDYNTPFTSRLSINKDNSKSQVFFKMNSLQSQDTAIYYCARALTYYDYEFAYWGQGTLVTVSAASTKGPSVFPLAPSSKSTSGGTAALGCLVKDYFPEPVTVSWNSGALTSGVHTFPAVLQSSGLYSLSSVVTVPSSSLGTQTYICNVNHKPSNTKVDKKVEPKSCDKTHTCPPCPAPELLGGPSVFLFPPKPKDTLMISRTPEVTCVVVDVSHEDPEVKFNWYVDGVEVHNAKTKPREEQYQSTYRVVSVLTVLHQDWLNGKEYKCKVSNKALPAPIEKTISKAKGQPREPQVYTLPPSREEMTKNQVSLTCLVKGFYPSDIAVEWESNGQPENNYKTTPPVLDSDGSFFLYSKLTVDKSRWQQGNVFSCSVMHEALHNHYTQKSLSLSPGK

SEQ ID NO: 537 - DNA, 2235 bp, Artificial Sequence
  Synthetic polynucleotide
tctatgtgcactgagcagcagtggattgtgaatcattgcattagtggaggtggctcgagcggtggcagcggtggctctggtggtattagcagtggtctgttaagcggtcgtagcgataatcatggcggcggttctgaagtgcagctggtggaatctgggggcggactggtgcagcctggcaagtctctgaagctgagctgcgaggccagcggcttcacctttagcggctacggcatgcactgggtgcgccaggcacctggcagaggcctggaaagcgtggcctacatcaccagcagcagcatcaacattaagtacgccgacgccgtgaagggccggttcaccgtgtccagagacaacgccaagaacctgctgttcctgcagatgaacatcctgaagtccgaggacaccgccatgtactactgcgccagattcgactgggacaagaactactggggccagggcacaatggtcacagtgtccagcggtggaggtggtagtggtggaggaagtggaggttcaggaggtggaagcggtggtggtggtagtgacatccagatgacccagagccccagcagcctgcctgcctctctgggcgatagagtgaccatcaactgccaggccagccaggacatcagcaactacctgaactggtatcagcagaagcccggcaaggcccccaagctgctgatctactacaccaacaagctggccgacggtgtgcccagcagattcagcggcagcggtagcggcagagacagcagcttcaccatcagctccctggaatccgaggatatcggcagctactactgccagcagtactacaactacccctggaccttcggccctggcaccaagctggaaatcaaaagaggaggtggtggatcccaggtgcagctgaaacagagcggcccgggcctggtgcagccgagccagagcctgagcattacctgcaccgtgagcggctttagcctgaccaactatggcgtgcattgggtgcgccagagcccgggcaaaggcctggaatggctgggcgtgatttggagcggcggcaacaccgattataacaccccgtttaccagccgcctgagcattaacaaagataacagcaaaagccaggtgttttttaaaatgaacagcctgcaaagccaggataccgcgatttattattgcgcgcgcgcgctgacctattatgattatgaatttgcgtattggggccagggcaccctggtgaccgtgagcgcggctagcaccaagggcccatcggtcttccccctggcaccctcctccaagagcacctctgggggcacagcggccctgggctgcctggtcaaggactacttccccgaaccggtgacggtgtcgtggaactcaggcgccctgaccagcggcgtgcacaccttcccggctgtcctacagtcctcaggactctactccctcagcagcgtggtgaccgtgccctccagcagcttgggcacccagacctacatctgcaacgtgaatcacaagcccagcaacaccaaggtggacaagaaagttgagcccaaatcttgtgacaaaactcacacatgcccaccgtgcccagcacctgaactcctggggggaccgtcagtcttcctcttccccccaaaacccaaggacaccctcatgatctcccggacccctgaggtcacatgcgtggtggtggacgtgagccacgaagaccctgaggtcaagttcaactggtacgtggacggcgtggaggtgcataatgccaagacaaagccgcgggaggagcagtaccagagcacgtaccgtgtggtcagcgtcctcaccgtcctgcaccaggactggctgaatggcaaggagtacaagtgcaaggtctccaacaaagccctcccagcccccatcgagaaaaccatctccaaagccaaagggcagccccgagaaccacaggtgtacaccctgcccccatcccgggaggagatgaccaagaaccaggtcagcctgacctgcctggtcaaaggcttctatcccagcgacatcgccgtggagtgggagagcaatgggcagccggagaacaactacaagaccacgcctcccgtgctggactccgacggctccttcttcctctacagcaagctcaccgtggacaagagcaggtggcagcaggggaacgtcttctcatgctccgtgatgcatgaggctctgcacaaccactacacgcagaagagcctctccctgtctccgggtaaatga

SEQ ID NO: 538 - protein, 744 aa, Artificial Sequence
  Synthetic polypeptide
SMCTEQQWIVNHCISGGGSSGGSGGSGGISSGLLSGRSDNHGGGSEVQLVESGGGLVQPGKSLKLSCEASGFTFSGYGMHWVRQAPGRGLESVAYITSSSINIKYADAVKGRFTVSRDNAKNLLFLQMNILKSEDTAMYYCARFDWDKNYWGQGTMVTVSSGGGGSGGGSGGSGGGSGGGGSDIQMTQSPSSLPASLGDRVTINCQASQDISNYLNWYQQKPGKAPKLLIYYTNKLADGVPSRFSGSGSGRDSSFTISSLESEDIGSYYCQQYYNYPWTFGPGTKLEIKRGGGGSQVQLKQSGPGLVQPSQSLSITCTVSGFSLTNYGVHWVRQSPGKGLEWLGVIWSGGNTDYNTPFTSRLSINKDNSKSQVFFKMNSLQSQDTAIYYCARALTYYDYEFAYWGQGTLVTVSAASTKGPSVFPLAPSSKSTSGGTAALGCLVKDYFPEPVTVSWNSGALTSGVHTFPAVLQSSGLYSLSSVVTVPSSSLGTQTYICNVNHKPSNTKVDKKVEPKSCDKTHTCPPCPAPELLGGPSVFLFPPKPKDTLMISRTPEVTCVVVDVSHEDPEVKFNWYVDGVEVHNAKTKPREEQYQSTYRVVSVLTVLHQDWLNGKEYKCKVSNKALPAPIEKTISKAKGQPREPQVYTLPPSREEMTKNQVSLTCLVKGFYPSDIAVEWESNGQPENNYKTTPPVLDSDGSFFLYSKLTVDKSRWQQGNVFSCSVMHEALHNHYTQKSLSLSPGK

SEQ ID NO: 539 - DNA, 2235 bp, Artificial Sequence
  Synthetic polynucleotide
attcatccgatgtgccatcctgagggtgtttgcgttgctctggatggaggtggctcgagcggtggcagcggtggctctggtggtattagcagtggtctgttaagcggtcgtagcgataatcatggcggcggttctgaagtgcagctggtggaatctgggggcggactggtgcagcctggcaagtctctgaagctgagctgcgaggccagcggcttcacctttagcggctacggcatgcactgggtgcgccaggcacctggcagaggcctggaaagcgtggcctacatcaccagcagcagcatcaacattaagtacgccgacgccgtgaagggccggttcaccgtgtccagagacaacgccaagaacctgctgttcctgcagatgaacatcctgaagtccgaggacaccgccatgtactactgcgccagattcgactgggacaagaactactggggccagggcacaatggtcacagtgtccagcggtggaggtggtagtggtggaggaagtggaggttcaggaggtggaagcggtggtggtggtagtgacatccagatgacccagagccccagcagcctgcctgcctctctgggcgatagagtgaccatcaactgccaggccagccaggacatcagcaactacctgaactggtatcagcagaagcccggcaaggcccccaagctgctgatctactacaccaacaagctggccgacggtgtgcccagcagattcagcggcagcggtagcggcagagacagcagcttcaccatcagctccctggaatccgaggatatcggcagctactactgccagcagtactacaactacccctggaccttcggccctggcaccaagctggaaatcaaaagaggaggtggtggatcccaggtgcagctgaaacagagcggcccgggcctggtgcagccgagccagagcctgagcattacctgcaccgtgagcggctttagcctgaccaactatggcgtgcattgggtgcgccagagcccgggcaaaggcctggaatggctgggcgtgatttggagcggcggcaacaccgattataacaccccgtttaccagccgcctgagcattaacaaagataacagcaaaagccaggtgttttttaaaatgaacagcctgcaaagccaggataccgcgatttattattgcgcgcgcgcgctgacctattatgattatgaatttgcgtattggggccagggcaccctggtgaccgtgagcgcggctagcaccaagggcccatcggtcttccccctggcaccctcctccaagagcacctctgggggcacagcggccctgggctgcctggtcaaggactacttccccgaaccggtgacggtgtcgtggaactcaggcgccctgaccagcggcgtgcacaccttcccggctgtcctacagtcctcaggactctactccctcagcagcgtggtgaccgtgccctccagcagcttgggcacccagacctacatctgcaacgtgaatcacaagcccagcaacaccaaggtggacaagaaagttgagcccaaatcttgtgacaaaactcacacatgcccaccgtgcccagcacctgaactcctggggggaccgtcagtcttcctcttccccccaaaacccaaggacaccctcatgatctcccggacccctgaggtcacatgcgtggtggtggacgtgagccacgaagaccctgaggtcaagttcaactggtacgtggacggcgtggaggtgcataatgccaagacaaagccgcgggaggagcagtaccagagcacgtaccgtgtggtcagcgtcctcaccgtcctgcaccaggactggctgaatggcaaggagtacaagtgcaaggtctccaacaaagccctcccagcccccatcgagaaaaccatctccaaagccaaagggcagccccgagaaccacaggtgtacaccctgcccccatcccgggaggagatgaccaagaaccaggtcagcctgacctgcctggtcaaaggcttctatcccagcgacatcgccgtggagtgggagagcaatgggcagccggagaacaactacaagaccacgcctcccgtgctggactccgacggctccttcttcctctacagcaagctcaccgtggacaagagcaggtggcagcaggggaacgtcttctcatgctccgtgatgcatgaggctctgcacaaccactacacgcagaagagcctctccctgtctccgggtaaatga

SEQ ID NO: 540 - protein, 744 aa, Artificial Sequence
  Synthetic polypeptide
IHPMCHPEGVCVALDGGGSSGGSGGSGGISSGLLSGRSDNHGGGSEVQLVESGGGLVQPGKSLKLSCEASGFTFSGYGMHWVRQAPGRGLESVAYITSSSINIKYADAVKGRFTVSRDNAKNLLFLQMNILKSEDTAMYYCARFDWDKNYWGQGTMVTVSSGGGGSGGGSGGSGGGSGGGGSDIQMTQSPSSLPASLGDRVTINCQASQDISNYLNWYQQKPGKAPKLLIYYTNKLADGVPSRFSGSGSGRDSSFTISSLESEDIGSYYCQQYYNYPWTFGPGTKLEIKRGGGGSQVQLKQSGPGLVQPSQSLSITCTVSGFSLTNYGVHWVRQSPGKGLEWLGVIWSGGNTDYNTPFTSRLSINKDNSKSQVFFKMNSLQSQDTAIYYCARALTYYDYEFAYWGQGTLVTVSAASTKGPSVFPLAPSSKSTSGGTAALGCLVKDYFPEPVTVSWNSGALTSGVHTFPAVLQSSGLYSLSSVVTVPSSSLGTQTYICNVNHKPSNTKVDKKVEPKSCDKTHTCPPCPAPELLGGPSVFLFPPKPKDTLMISRTPEVTCVVVDVSHEDPEVKFNWYVDGVEVHNAKTKPREEQYQSTYRVVSVLTVLHQDWLNGKEYKCKVSNKALPAPIEKTISKAKGQPREPQVYTLPPSREEMTKNQVSLTCLVKGFYPSDIAVEWESNGQPENNYKTTPPVLDSDGSFFLYSKLTVDKSRWQQGNVFSCSVMHEALHNHYTQKSLSLSPGK

SEQ ID NO: 541 - DNA, 2235 bp, Artificial Sequence
  Synthetic polynucleotide
gattgctttgtgcctgggtggtatttggcgggtccgtgcgctcagggaggtggctcgagcggtggcagcggtggctctggtggtattagcagtggtctgttaagcggtcgtagcgataatcatggcggcggttctgaagtgcagctggtggaatctgggggcggactggtgcagcctggcaagtctctgaagctgagctgcgaggccagcggcttcacctttagcggctacggcatgcactgggtgcgccaggcacctggcagaggcctggaaagcgtggcctacatcaccagcagcagcatcaacattaagtacgccgacgccgtgaagggccggttcaccgtgtccagagacaacgccaagaacctgctgttcctgcagatgaacatcctgaagtccgaggacaccgccatgtactactgcgccagattcgactgggacaagaactactggggccagggcacaatggtcacagtgtccagcggtggaggtggtagtggtggaggaagtggaggttcaggaggtggaagcggtggtggtggtagtgacatccagatgacccagagccccagcagcctgcctgcctctctgggcgatagagtgaccatcaactgccaggccagccaggacatcagcaactacctgaactggtatcagcagaagcccggcaaggcccccaagctgctgatctactacaccaacaagctggccgacggtgtgcccagcagattcagcggcagcggtagcggcagagacagcagcttcaccatcagctccctggaatccgaggatatcggcagctactactgccagcagtactacaactacccctggaccttcggccctggcaccaagctggaaatcaaaagaggaggtggtggatcccaggtgcagctgaaacagagcggcccgggcctggtgcagccgagccagagcctgagcattacctgcaccgtgagcggctttagcctgaccaactatggcgtgcattgggtgcgccagagcccgggcaaaggcctggaatggctgggcgtgatttggagcggcggcaacaccgattataacaccccgtttaccagccgcctgagcattaacaaagataacagcaaaagccaggtgttttttaaaatgaacagcctgcaaagccaggataccgcgatttattattgcgcgcgcgcgctgacctattatgattatgaatttgcgtattggggccagggcaccctggtgaccgtgagcgcggctagcaccaagggcccatcggtcttccccctggcaccctcctccaagagcacctctgggggcacagcggccctgggctgcctggtcaaggactacttccccgaaccggtgacggtgtcgtggaactcaggcgccctgaccagcggcgtgcacaccttcccggctgtcctacagtcctcaggactctactccctcagcagcgtggtgaccgtgccctccagcagcttgggcacccagacctacatctgcaacgtgaatcacaagcccagcaacaccaaggtggacaagaaagttgagcccaaatcttgtgacaaaactcacacatgcccaccgtgcccagcacctgaactcctggggggaccgtcagtcttcctcttccccccaaaacccaaggacaccctcatgatctcccggacccctgaggtcacatgcgtggtggtggacgtgagccacgaagaccctgaggtcaagttcaactggtacgtggacggcgtggaggtgcataatgccaagacaaagccgcgggaggagcagtaccagagcacgtaccgtgtggtcagcgtcctcaccgtcctgcaccaggactggctgaatggcaaggagtacaagtgcaaggtctccaacaaagccctcccagcccccatcgagaaaaccatctccaaagccaaagggcagccccgagaaccacaggtgtacaccctgcccccatcccgggaggagatgaccaagaaccaggtcagcctgacctgcctggtcaaaggcttctatcccagcgacatcgccgtggagtgggagagcaatgggcagccggagaacaactacaagaccacgcctcccgtgctggactccgacggctccttcttcctctacagcaagctcaccgtggacaagagcaggtggcagcaggggaacgtcttctcatgctccgtgatgcatgaggctctgcacaaccactacacgcagaagagcctctccctgtctccgggtaaatga

SEQ ID NO: 542 - protein, 744 aa, Artificial Sequence
  Synthetic polypeptide
DCFVPGWYLAGPCAQGGGSSGGSGGSGGISSGLLSGRSDNHGGGSEVQLVESGGGLVQPGKSLKLSCEASGFTFSGYGMHWVRQAPGRGLESVAYITSSSINIKYADAVKGRFTVSRDNAKNLLFLQMNILKSEDTAMYYCARFDWDKNYWGQGTMVTVSSGGGGSGGGSGGSGGGSGGGGSDIQMTQSPSSLPASLGDRVTINCQASQDISNYLNWYQQKPGKAPKLLIYYTNKLADGVPSRFSGSGSGRDSSFTISSLESEDIGSYYCQQYYNYPWTFGPGTKLEIKRGGGGSQVQLKQSGPGLVQPSQSLSITCTVSGFSLTNYGVHWVRQSPGKGLEWLGVIWSGGNTDYNTPFTSRLSINKDNSKSQVFFKMNSLQSQDTAIYYCARALTYYDYEFAYWGQGTLVTVSAASTKGPSVFPLAPSSKSTSGGTAALGCLVKDYFPEPVTVSWNSGALTSGVHTFPAVLQSSGLYSLSSVVTVPSSSLGTQTYICNVNHKPSNTKVDKKVEPKSCDKTHTCPPCPAPELLGGPSVFLFPPKPKDTLMISRTPEVTCVVVDVSHEDPEVKFNWYVDGVEVHNAKTKPREEQYQSTYRVVSVLTVLHQDWLNGKEYKCKVSNKALPAPIEKTISKAKGQPREPQVYTLPPSREEMTKNQVSLTCLVKGFYPSDIAVEWESNGQPENNYKTTPPVLDSDGSFFLYSKLTVDKSRWQQGNVFSCSVMHEALHNHYTQKSLSLSPGK

SEQ ID NO: 543 - DNA, 2232 bp, Artificial Sequence
  Synthetic polynucleotide
gtgtgccattctcggttggagtggcttctgggttgccaaggaggaggtggctcgagcggtggcagcggtggctctggtggtattagcagtggtctgttaagcggtcgtagcgataatcatggcggcggttctgaagtgcagctggtggaatctgggggcggactggtgcagcctggcaagtctctgaagctgagctgcgaggccagcggcttcacctttagcggctacggcatgcactgggtgcgccaggcacctggcagaggcctggaaagcgtggcctacatcaccagcagcagcatcaacattaagtacgccgacgccgtgaagggccggttcaccgtgtccagagacaacgccaagaacctgctgttcctgcagatgaacatcctgaagtccgaggacaccgccatgtactactgcgccagattcgactgggacaagaactactggggccagggcacaatggtcacagtgtccagcggtggaggtggtagtggtggaggaagtggaggttcaggaggtggaagcggtggtggtggtagtgacatccagatgacccagagccccagcagcctgcctgcctctctgggcgatagagtgaccatcaactgccaggccagccaggacatcagcaactacctgaactggtatcagcagaagcccggcaaggcccccaagctgctgatctactacaccaacaagctggccgacggtgtgcccagcagattcagcggcagcggtagcggcagagacagcagcttcaccatcagctccctggaatccgaggatatcggcagctactactgccagcagtactacaactacccctggaccttcggccctggcaccaagctggaaatcaaaagaggaggtggtggatcccaggtgcagctgaaacagagcggcccgggcctggtgcagccgagccagagcctgagcattacctgcaccgtgagcggctttagcctgaccaactatggcgtgcattgggtgcgccagagcccgggcaaaggcctggaatggctgggcgtgatttggagcggcggcaacaccgattataacaccccgtttaccagccgcctgagcattaacaaagataacagcaaaagccaggtgttttttaaaatgaacagcctgcaaagccaggataccgcgatttattattgcgcgcgcgcgctgacctattatgattatgaatttgcgtattggggccagggcaccctggtgaccgtgagcgcggctagcaccaagggcccatcggtcttccccctggcaccctcctccaagagcacctctgggggcacagcggccctgggctgcctggtcaaggactacttccccgaaccggtgacggtgtcgtggaactcaggcgccctgaccagcggcgtgcacaccttcccggctgtcctacagtcctcaggactctactccctcagcagcgtggtgaccgtgccctccagcagcttgggcacccagacctacatctgcaacgtgaatcacaagcccagcaacaccaaggtggacaagaaagttgagcccaaatcttgtgacaaaactcacacatgcccaccgtgcccagcacctgaactcctggggggaccgtcagtcttcctcttccccccaaaacccaaggacaccctcatgatctcccggacccctgaggtcacatgcgtggtggtggacgtgagccacgaagaccctgaggtcaagttcaactggtacgtggacggcgtggaggtgcataatgccaagacaaagccgcgggaggagcagtaccagagcacgtaccgtgtggtcagcgtcctcaccgtcctgcaccaggactggctgaatggcaaggagtacaagtgcaaggtctccaacaaagccctcccagcccccatcgagaaaaccatctccaaagccaaagggcagccccgagaaccacaggtgtacaccctgcccccatcccgggaggagatgaccaagaaccaggtcagcctgacctgcctggtcaaaggcttctatcccagcgacatcgccgtggagtgggagagcaatgggcagccggagaacaactacaagaccacgcctcccgtgctggactccgacggctccttcttcctctacagcaagctcaccgtggacaagagcaggtggcagcaggggaacgtcttctcatgctccgtgatgcatgaggctctgcacaaccactacacgcagaagagcctctccctgtctccgggtaaatga

SEQ ID NO: 544 - protein, 743 aa, Artificial Sequence
  Synthetic polypeptide
VCHSRLEWLLGCQGGGGSSGGSGGSGGISSGLLSGRSDNHGGGSEVQLVESGGGLVQPGKSLKLSCEASGFTFSGYGMHWVRQAPGRGLESVAYITSSSINIKYADAVKGRFTVSRDNAKNLLFLQMNILKSEDTAMYYCARFDWDKNYWGQGTMVTVSSGGGGSGGGSGGSGGGSGGGGSDIQMTQSPSSLPASLGDRVTINCQASQDISNYLNWYQQKPGKAPKLLIYYTNKLADGVPSRFSGSGSGRDSSFTISSLESEDIGSYYCQQYYNYPWTFGPGTKLEIKRGGGGSQVQLKQSGPGLVQPSQSLSITCTVSGFSLTNYGVHWVRQSPGKGLEWLGVIWSGGNTDYNTPFTSRLSINKDNSKSQVFFKMNSLQSQDTAIYYCARALTYYDYEFAYWGQGTLVTVSAASTKGPSVFPLAPSSKSTSGGTAALGCLVKDYFPEPVTVSWNSGALTSGVHTFPAVLQSSGLYSLSSVVTVPSSSLGTQTYICNVNHKPSNTKVDKKVEPKSCDKTHTCPPCPAPELLGGPSVFLFPPKPKDTLMISRTPEVTCVVVDVSHEDPEVKFNWYVDGVEVHNAKTKPREEQYQSTYRVVSVLTVLHQDWLNGKEYKCKVSNKALPAPIEKTISKAKGQPREPQVYTLPPSREEMTKNQVSLTCLVKGFYPSDIAVEWESNGQPENNYKTTPPVLDSDGSFFLYSKLTVDKSRWQQGNVFSCSVMHEALHNHYTQKSLSLSPGK

SEQ ID NO: 545 - DNA, 2235 bp, Artificial Sequence
  Synthetic polynucleotide
gtgggtgagtgcgttccgggtccgcatgggtgctggatggcttatggaggtggctcgagcggtggcagcggtggctctggtggtattagcagtggtctgttaagcggtcgtagcgataatcatggcggcggttctgaagtgcagctggtggaatctgggggcggactggtgcagcctggcaagtctctgaagctgagctgcgaggccagcggcttcacctttagcggctacggcatgcactgggtgcgccaggcacctggcagaggcctggaaagcgtggcctacatcaccagcagcagcatcaacattaagtacgccgacgccgtgaagggccggttcaccgtgtccagagacaacgccaagaacctgctgttcctgcagatgaacatcctgaagtccgaggacaccgccatgtactactgcgccagattcgactgggacaagaactactggggccagggcacaatggtcacagtgtccagcggtggaggtggtagtggtggaggaagtggaggttcaggaggtggaagcggtggtggtggtagtgacatccagatgacccagagccccagcagcctgcctgcctctctgggcgatagagtgaccatcaactgccaggccagccaggacatcagcaactacctgaactggtatcagcagaagcccggcaaggcccccaagctgctgatctactacaccaacaagctggccgacggtgtgcccagcagattcagcggcagcggtagcggcagagacagcagcttcaccatcagctccctggaatccgaggatatcggcagctactactgccagcagtactacaactacccctggaccttcggccctggcaccaagctggaaatcaaaagaggaggtggtggatcccaggtgcagctgaaacagagcggcccgggcctggtgcagccgagccagagcctgagcattacctgcaccgtgagcggctttagcctgaccaactatggcgtgcattgggtgcgccagagcccgggcaaaggcctggaatggctgggcgtgatttggagcggcggcaacaccgattataacaccccgtttaccagccgcctgagcattaacaaagataacagcaaaagccaggtgttttttaaaatgaacagcctgcaaagccaggataccgcgatttattattgcgcgcgcgcgctgacctattatgattatgaatttgcgtattggggccagggcaccctggtgaccgtgagcgcggctagcaccaagggcccatcggtcttccccctggcaccctcctccaagagcacctctgggggcacagcggccctgggctgcctggtcaaggactacttccccgaaccggtgacggtgtcgtggaactcaggcgccctgaccagcggcgtgcacaccttcccggctgtcctacagtcctcaggactctactccctcagcagcgtggtgaccgtgccctccagcagcttgggcacccagacctacatctgcaacgtgaatcacaagcccagcaacaccaaggtggacaagaaagttgagcccaaatcttgtgacaaaactcacacatgcccaccgtgcccagcacctgaactcctggggggaccgtcagtcttcctcttccccccaaaacccaaggacaccctcatgatctcccggacccctgaggtcacatgcgtggtggtggacgtgagccacgaagaccctgaggtcaagttcaactggtacgtggacggcgtggaggtgcataatgccaagacaaagccgcgggaggagcagtaccagagcacgtaccgtgtggtcagcgtcctcaccgtcctgcaccaggactggctgaatggcaaggagtacaagtgcaaggtctccaacaaagccctcccagcccccatcgagaaaaccatctccaaagccaaagggcagccccgagaaccacaggtgtacaccctgcccccatcccgggaggagatgaccaagaaccaggtcagcctgacctgcctggtcaaaggcttctatcccagcgacatcgccgtggagtgggagagcaatgggcagccggagaacaactacaagaccacgcctcccgtgctggactccgacggctccttcttcctctacagcaagctcaccgtggacaagagcaggtggcagcaggggaacgtcttctcatgctccgtgatgcatgaggctctgcacaaccactacacgcagaagagcctctccctgtctccgggtaaatga

SEQ ID NO: 546 - protein, 744 aa, Artificial Sequence
  Synthetic polypeptide
VGECVPGPHGCWMAYGGGSSGGSGGSGGISSGLLSGRSDNHGGGSEVQLVESGGGLVQPGKSLKLSCEASGFTFSGYGMHWVRQAPGRGLESVAYITSSSINIKYADAVKGRFTVSRDNAKNLLFLQMNILKSEDTAMYYCARFDWDKNYWGQGTMVTVSSGGGGSGGGSGGSGGGSGGGGSDIQMTQSPSSLPASLGDRVTINCQASQDISNYLNWYQQKPGKAPKLLIYYTNKLADGVPSRFSGSGSGRDSSFTISSLESEDIGSYYCQQYYNYPWTFGPGTKLEIKRGGGGSQVQLKQSGPGLVQPSQSLSITCTVSGFSLTNYGVHWVRQSPGKGLEWLGVIWSGGNTDYNTPFTSRLSINKDNSKSQVFFKMNSLQSQDTAIYYCARALTYYDYEFAYWGQGTLVTVSAASTKGPSVFPLAPSSKSTSGGTAALGCLVKDYFPEPVTVSWNSGALTSGVHTFPAVLQSSGLYSLSSVVTVPSSSLGTQTYICNVNHKPSNTKVDKKVEPKSCDKTHTCPPCPAPELLGGPSVFLFPPKPKDTLMISRTPEVTCVVVDVSHEDPEVKFNWYVDGVEVHNAKTKPREEQYQSTYRVVSVLTVLHQDWLNGKEYKCKVSNKALPAPIEKTISKAKGQPREPQVYTLPPSREEMTKNQVSLTCLVKGFYPSDIAVEWESNGQPENNYKTTPPVLDSDGSFFLYSKLTVDKSRWQQGNVFSCSVMHEALHNHYTQKSLSLSPGK

SEQ ID NO: 547 - DNA, 861 bp, Artificial Sequence
  Synthetic polynucleotide
ggttatcggtggggttgcgagtggaattgcggtgggattactactggctcgagcggtggcagcggtggctctggtggtctgagcggccgttccgataatcatggcggcggttctcaggctgtcgtgacacaggaaagcgccctgaccaccagccctggcgagacagtgaccctgacctgcagatctagcacaggcgccgtgaccacaagcaactacgccaactgggtgcaggaaaagcccgaccacctgttcaccggcctgatcggcggcaccaacaaaagggctccaggcgtgccagccagattcagcggcagcctgattggcgataaggccgccctgacaatcactggcgcccagaccgaggacgaggccatctacttttgcgccctgtggtacagcaacctgtgggtgttcggcggaggcaccaagctgacagtgctgggaggcggaggatctggcggaggcggaagtggcggagggggatctgaagtgcagctggtggaatctggcggcggactggtgcagcctaagggctctctgaagctgagctgtgccgccagcggcttcaccttcaacacctacgccatgaattgggtgcgccaggcccctggcaagggactggaatgggtggcccggatcagaagcaagtacaacaattacgccacctactacgccgacagcgtgaaggaccggttcaccatcagccgggacgacagccagagcatcctgtatctgcagatgaacaacctgaaaaccgaggacaccgccatgtactactgcgtgcggcacggcaacttcggcaacagctatgtgtcttggtttgcctactggggccagggcaccctcgtgacagtgtctgct

SEQ ID NO: 548 - protein, 287 aa, Artificial Sequence
  Synthetic polypeptide
GYRWGCEWNCGGITTGSSGGSGGSGGLSGRSDNHGGGSQAVVTQESALTTSPGETVTLTCRSSTGAVTTSNYANWVQEKPDHLFTGLIGGTNKRAPGVPARFSGSLIGDKAALTITGAQTEDEAIYFCALWYSNLWVFGGGTKLTVLGGGGSGGGGSGGGGSEVQLVESGGGLVQPKGSLKLSCAASGFTFNTYAMNWVRQAPGKGLEWVARIRSKYNNYATYYADSVKDRFTISRDDSQSILYLQMNNLKTEDTAMYYCVRHGNFGNSYVSWFAYWGQGTLVTVSA

SEQ ID NO: 549 - DNA, 1569 bp, Artificial Sequence
  Synthetic polynucleotide
ggttatcggtggggttgcgagtggaattgcggtgggattactactggctcgagcggtggcagcggtggctctggtggtctgagcggccgttccgataatcatggcggcggttctcaggctgtcgtgacacaggaaagcgccctgaccaccagccctggcgagacagtgaccctgacctgcagatctagcacaggcgccgtgaccacaagcaactacgccaactgggtgcaggaaaagcccgaccacctgttcaccggcctgatcggcggcaccaacaaaagggctccaggcgtgccagccagattcagcggcagcctgattggcgataaggccgccctgacaatcactggcgcccagaccgaggacgaggccatctacttttgcgccctgtggtacagcaacctgtgggtgttcggcggaggcaccaagctgacagtgctgggaggcggaggatctggcggaggcggaagtggcggagggggatctgaagtgcagctggtggaatctggcggcggactggtgcagcctaagggctctctgaagctgagctgtgccgccagcggcttcaccttcaacacctacgccatgaattgggtgcgccaggcccctggcaagggactggaatgggtggcccggatcagaagcaagtacaacaattacgccacctactacgccgacagcgtgaaggaccggttcaccatcagccgggacgacagccagagcatcctgtatctgcagatgaacaacctgaaaaccgaggacaccgccatgtactactgcgtgcggcacggcaacttcggcaacagctatgtgtcttggtttgcctactggggccagggcaccctcgtgacagtgtctgctggcggctccctggaccctaagtcatctgacaaaactcacacatgcccaccgtgcccagcacctgaactcctggggggaccgtcagtcttcctcttccccccaaaacccaaggacaccctcatgatctcccggacccctgaggtcacatgcgtggtggtggacgtgagccacgaagaccctgaggtcaagttcaactggtacgtggacggcgtggaggtgcataatgccaagacaaagccgcgggaggagcagtacaacagcacgtaccgtgtggtcagcgtcctcaccgtcctgcaccaggactggctgaatggcaaggagtacaagtgcaaggtctccaacaaagccctcccagcccccatcgagaaaaccatctccaaagccaaagggcagccccgagaaccacaggtgtacaccctgcccccatcccgggaggagatgaccaagaaccaggtcagcctgacctgcctggtcaaaggcttctatcccagcgacatcgccgtggagtgggagagcaatgggcagccggagaacaactacaagaccacgcctcccgtgctggactccgacggctccttcttcctctacagcaagctcaccgtggacaagagcaggtggcagcaggggaacgtcttctcatgctccgtgatgcatgaggctctgcacaaccactacacgcagaagagcctctccctgtctccgggtaaa

SEQ ID NO: 550 - protein, 523 aa, Artificial Sequence
  Synthetic polypeptide
GYRWGCEWNCGGITTGSSGGSGGSGGLSGRSDNHGGGSQAVVTQESALTTSPGETVTLTCRSSTGAVTTSNYANWVQEKPDHLFTGLIGGTNKRAPGVPARFSGSLIGDKAALTITGAQTEDEAIYFCALWYSNLWVFGGGTKLTVLGGGGSGGGGSGGGGSEVQLVESGGGLVQPKGSLKLSCAASGFTFNTYAMNWVRQAPGKGLEWVARIRSKYNNYATYYADSVKDRFTISRDDSQSILYLQMNNLKTEDTAMYYCVRHGNFGNSYVSWFAYWGQGTLVTVSAGGSLDPKSSDKTHTCPPCPAPELLGGPSVFLFPPKPKDTLMISRTPEVTCVVVDVSHEDPEVKFNWYVDGVEVHNAKTKPREEQYNSTYRVVSVLTVLHQDWLNGKEYKCKVSNKALPAPIEKTISKAKGQPREPQVYTLPPSREEMTKNQVSLTCLVKGFYPSDIAVEWESNGQPENNYKTTPPVLDSDGSFFLYSKLTVDKSRWQQGNVFSCSVMHEALHNHYTQKSLSLSPGK

SEQ ID NO: 551 - DNA, 861 bp, Artificial Sequence
  Synthetic polynucleotide
tggtattcgggtgggtgcgaggctttttgcggtattttgtcgtcgggctcgagcggtggcagcggtggctctggtggtctgagcggccgttccgataatcatggcggcggttctcaggctgtcgtgacacaggaaagcgccctgaccaccagccctggcgagacagtgaccctgacctgcagatctagcacaggcgccgtgaccacaagcaactacgccaactgggtgcaggaaaagcccgaccacctgttcaccggcctgatcggcggcaccaacaaaagggctccaggcgtgccagccagattcagcggcagcctgattggcgataaggccgccctgacaatcactggcgcccagaccgaggacgaggccatctacttttgcgccctgtggtacagcaacctgtgggtgttcggcggaggcaccaagctgacagtgctgggaggcggaggatctggcggaggcggaagtggcggagggggatctgaagtgcagctggtggaatctggcggcggactggtgcagcctaagggctctctgaagctgagctgtgccgccagcggcttcaccttcaacacctacgccatgaattgggtgcgccaggcccctggcaagggactggaatgggtggcccggatcagaagcaagtacaacaattacgccacctactacgccgacagcgtgaaggaccggttcaccatcagccgggacgacagccagagcatcctgtatctgcagatgaacaacctgaaaaccgaggacaccgccatgtactactgcgtgcggcacggcaacttcggcaacagctatgtgtcttggtttgcctactggggccagggcaccctcgtgacagtgtctgct

SEQ ID NO: 552 - protein, 287 aa, Artificial Sequence
  Synthetic polypeptide
WYSGGCEAFCGILSSGSSGGSGGSGGLSGRSDNHGGGSQAVVTQESALTTSPGETVTLTCRSSTGAVTTSNYANWVQEKPDHLFTGLIGGTNKRAPGVPARFSGSLIGDKAALTITGAQTEDEAIYFCALWYSNLWVFGGGTKLTVLGGGGSGGGGSGGGGSEVQLVESGGGLVQPKGSLKLSCAASGFTFNTYAMNWVRQAPGKGLEWVARIRSKYNNYATYYADSVKDRFTISRDDSQSILYLQMNNLKTEDTAMYYCVRHGNFGNSYVSWFAYWGQGTLVTVSA

SEQ ID NO: 553 - DNA, 1569 bp, Artificial Sequence
  Synthetic polynucleotide
tggtattcgggtgggtgcgaggctttttgcggtattttgtcgtcgggctcgagcggtggcagcggtggctctggtggtctgagcggccgttccgataatcatggcggcggttctcaggctgtcgtgacacaggaaagcgccctgaccaccagccctggcgagacagtgaccctgacctgcagatctagcacaggcgccgtgaccacaagcaactacgccaactgggtgcaggaaaagcccgaccacctgttcaccggcctgatcggcggcaccaacaaaagggctccaggcgtgccagccagattcagcggcagcctgattggcgataaggccgccctgacaatcactggcgcccagaccgaggacgaggccatctacttttgcgccctgtggtacagcaacctgtgggtgttcggcggaggcaccaagctgacagtgctgggaggcggaggatctggcggaggcggaagtggcggagggggatctgaagtgcagctggtggaatctggcggcggactggtgcagcctaagggctctctgaagctgagctgtgccgccagcggcttcaccttcaacacctacgccatgaattgggtgcgccaggcccctggcaagggactggaatgggtggcccggatcagaagcaagtacaacaattacgccacctactacgccgacagcgtgaaggaccggttcaccatcagccgggacgacagccagagcatcctgtatctgcagatgaacaacctgaaaaccgaggacaccgccatgtactactgcgtgcggcacggcaacttcggcaacagctatgtgtcttggtttgcctactggggccagggcaccctcgtgacagtgtctgctggcggctccctggaccctaagtcatctgacaaaactcacacatgcccaccgtgcccagcacctgaactcctggggggaccgtcagtcttcctcttccccccaaaacccaaggacaccctcatgatctcccggacccctgaggtcacatgcgtggtggtggacgtgagccacgaagaccctgaggtcaagttcaactggtacgtggacggcgtggaggtgcataatgccaagacaaagccgcgggaggagcagtacaacagcacgtaccgtgtggtcagcgtcctcaccgtcctgcaccaggactggctgaatggcaaggagtacaagtgcaaggtctccaacaaagccctcccagcccccatcgagaaaaccatctccaaagccaaagggcagccccgagaaccacaggtgtacaccctgcccccatcccgggaggagatgaccaagaaccaggtcagcctgacctgcctggtcaaaggcttctatcccagcgacatcgccgtggagtgggagagcaatgggcagccggagaacaactacaagaccacgcctcccgtgctggactccgacggctccttcttcctctacagcaagctcaccgtggacaagagcaggtggcagcaggggaacgtcttctcatgctccgtgatgcatgaggctctgcacaaccactacacgcagaagagcctctccctgtctccgggtaaa

SEQ ID NO: 554 - protein, 523 aa, Artificial Sequence
  Synthetic polypeptide
WYSGGCEAFCGILSSGSSGGSGGSGGLSGRSDNHGGGSQAVVTQESALTTSPGETVTLTCRSSTGAVTTSNYANWVQEKPDHLFTGLIGGTNKRAPGVPARFSGSLIGDKAALTITGAQTEDEAIYFCALWYSNLWVFGGGTKLTVLGGGGSGGGGSGGGGSEVQLVESGGGLVQPKGSLKLSCAASGFTFNTYAMNWVRQAPGKGLEWVARIRSKYNNYATYYADSVKDRFTISRDDSQSILYLQMNNLKTEDTAMYYCVRHGNFGNSYVSWFAYWGQGTLVTVSAGGSLDPKSSDKTHTCPPCPAPELLGGPSVFLFPPKPKDTLMISRTPEVTCVVVDVSHEDPEVKFNWYVDGVEVHNAKTKPREEQYNSTYRVVSVLTVLHQDWLNGKEYKCKVSNKALPAPIEKTISKAKGQPREPQVYTLPPSREEMTKNQVSLTCLVKGFYPSDIAVEWESNGQPENNYKTTPPVLDSDGSFFLYSKLTVDKSRWQQGNVFSCSVMHEALHNHYTQKSLSLSPGK

SEQ ID NO: 555 - DNA, 861 bp, Artificial Sequence
  Synthetic polynucleotide
gtttattattgcggtgggaatgagagtctgtgcggtgagaggaggggctcgagcggtggcagcggtggctctggtggtctgagcggccgttccgataatcatggcggcggttctcaggctgtcgtgacacaggaaagcgccctgaccaccagccctggcgagacagtgaccctgacctgcagatctagcacaggcgccgtgaccacaagcaactacgccaactgggtgcaggaaaagcccgaccacctgttcaccggcctgatcggcggcaccaacaaaagggctccaggcgtgccagccagattcagcggcagcctgattggcgataaggccgccctgacaatcactggcgcccagaccgaggacgaggccatctacttttgcgccctgtggtacagcaacctgtgggtgttcggcggaggcaccaagctgacagtgctgggaggcggaggatctggcggaggcggaagtggcggagggggatctgaagtgcagctggtggaatctggcggcggactggtgcagcctaagggctctctgaagctgagctgtgccgccagcggcttcaccttcaacacctacgccatgaattgggtgcgccaggcccctggcaagggactggaatgggtggcccggatcagaagcaagtacaacaattacgccacctactacgccgacagcgtgaaggaccggttcaccatcagccgggacgacagccagagcatcctgtatctgcagatgaacaacctgaaaaccgaggacaccgccatgtactactgcgtgcggcacggcaacttcggcaacagctatgtgtcttggtttgcctactggggccagggcaccctcgtgacagtgtctgct

SEQ ID NO: 556 - protein, 287 aa, Artificial Sequence
  Synthetic polypeptide
VYYCGGNESLCGERRGSSGGSGGSGGLSGRSDNHGGGSQAVVTQESALTTSPGETVTLTCRSSTGAVTTSNYANWVQEKPDHLFTGLIGGTNKRAPGVPARFSGSLIGDKAALTITGAQTEDEAIYFCALWYSNLWVFGGGTKLTVLGGGGSGGGGSGGGGSEVQLVESGGGLVQPKGSLKLSCAASGFTFNTYAMNWVRQAPGKGLEWVARIRSKYNNYATYYADSVKDRFTISRDDSQSILYLQMNNLKTEDTAMYYCVRHGNFGNSYVSWFAYWGQGTLVTVSA

SEQ ID NO: 557 - DNA, 1569 bp, Artificial Sequence
  Synthetic polynucleotide
gtttattattgcggtgggaatgagagtctgtgcggtgagaggaggggctcgagcggtggcagcggtggctctggtggtctgagcggccgttccgataatcatggcggcggttctcaggctgtcgtgacacaggaaagcgccctgaccaccagccctggcgagacagtgaccctgacctgcagatctagcacaggcgccgtgaccacaagcaactacgccaactgggtgcaggaaaagcccgaccacctgttcaccggcctgatcggcggcaccaacaaaagggctccaggcgtgccagccagattcagcggcagcctgattggcgataaggccgccctgacaatcactggcgcccagaccgaggacgaggccatctacttttgcgccctgtggtacagcaacctgtgggtgttcggcggaggcaccaagctgacagtgctgggaggcggaggatctggcggaggcggaagtggcggagggggatctgaagtgcagctggtggaatctggcggcggactggtgcagcctaagggctctctgaagctgagctgtgccgccagcggcttcaccttcaacacctacgccatgaattgggtgcgccaggcccctggcaagggactggaatgggtggcccggatcagaagcaagtacaacaattacgccacctactacgccgacagcgtgaaggaccggttcaccatcagccgggacgacagccagagcatcctgtatctgcagatgaacaacctgaaaaccgaggacaccgccatgtactactgcgtgcggcacggcaacttcggcaacagctatgtgtcttggtttgcctactggggccagggcaccctcgtgacagtgtctgctggcggctccctggaccctaagtcatctgacaaaactcacacatgcccaccgtgcccagcacctgaactcctggggggaccgtcagtcttcctcttccccccaaaacccaaggacaccctcatgatctcccggacccctgaggtcacatgcgtggtggtggacgtgagccacgaagaccctgaggtcaagttcaactggtacgtggacggcgtggaggtgcataatgccaagacaaagccgcgggaggagcagtacaacagcacgtaccgtgtggtcagcgtcctcaccgtcctgcaccaggactggctgaatggcaaggagtacaagtgcaaggtctccaacaaagccctcccagcccccatcgagaaaaccatctccaaagccaaagggcagccccgagaaccacaggtgtacaccctgcccccatcccgggaggagatgaccaagaaccaggtcagcctgacctgcctggtcaaaggcttctatcccagcgacatcgccgtggagtgggagagcaatgggcagccggagaacaactacaagaccacgcctcccgtgctggactccgacggctccttcttcctctacagcaagctcaccgtggacaagagcaggtggcagcaggggaacgtcttctcatgctccgtgatgcatgaggctctgcacaaccactacacgcagaagagcctctccctgtctccgggtaaa

SEQ ID NO: 558 - protein, 523 aa, Artificial Sequence
  Synthetic polypeptide
VYYCGGNESLCGERRGSSGGSGGSGGLSGRSDNHGGGSQAVVTQESALTTSPGETVTLTCRSSTGAVTTSNYANWVQEKPDHLFTGLIGGTNKRAPGVPARFSGSLIGDKAALTITGAQTEDEAIYFCALWYSNLWVFGGGTKLTVLGGGGSGGGGSGGGGSEVQLVESGGGLVQPKGSLKLSCAASGFTFNTYAMNWVRQAPGKGLEWVARIRSKYNNYATYYADSVKDRFTISRDDSQSILYLQMNNLKTEDTAMYYCVRHGNFGNSYVSWFAYWGQGTLVTVSAGGSLDPKSSDKTHTCPPCPAPELLGGPSVFLFPPKPKDTLMISRTPEVTCVVVDVSHEDPEVKFNWYVDGVEVHNAKTKPREEQYNSTYRVVSVLTVLHQDWLNGKEYKCKVSNKALPAPIEKTISKAKGQPREPQVYTLPPSREEMTKNQVSLTCLVKGFYPSDIAVEWESNGQPENNYKTTPPVLDSDGSFFLYSKLTVDKSRWQQGNVFSCSVMHEALHNHYTQKSLSLSPGK

SEQ ID NO: 559 - DNA, 861 bp, Artificial Sequence
  Synthetic polynucleotide
tttatgtgccagcagcggatgtgggggaatgagttttgccatcagggctcgagcggtggcagcggtggctctggtggtctgagcggccgttccgataatcatggcggcggttctcaggctgtcgtgacacaggaaagcgccctgaccaccagccctggcgagacagtgaccctgacctgcagatctagcacaggcgccgtgaccacaagcaactacgccaactgggtgcaggaaaagcccgaccacctgttcaccggcctgatcggcggcaccaacaaaagggctccaggcgtgccagccagattcagcggcagcctgattggcgataaggccgccctgacaatcactggcgcccagaccgaggacgaggccatctacttttgcgccctgtggtacagcaacctgtgggtgttcggcggaggcaccaagctgacagtgctgggaggcggaggatctggcggaggcggaagtggcggagggggatctgaagtgcagctggtggaatctggcggcggactggtgcagcctaagggctctctgaagctgagctgtgccgccagcggcttcaccttcaacacctacgccatgaattgggtgcgccaggcccctggcaagggactggaatgggtggcccggatcagaagcaagtacaacaattacgccacctactacgccgacagcgtgaaggaccggttcaccatcagccgggacgacagccagagcatcctgtatctgcagatgaacaacctgaaaaccgaggacaccgccatgtactactgcgtgcggcacggcaacttcggcaacagctatgtgtcttggtttgcctactggggccagggcaccctcgtgacagtgtctgct

SEQ ID NO: 560 - protein, 287 aa, Artificial Sequence
  Synthetic polypeptide
FMCQQRMWGNEFCHQGSSGGSGGSGGLSGRSDNHGGGSQAVVTQESALTTSPGETVTLTCRSSTGAVTTSNYANWVQEKPDHLFTGLIGGTNKRAPGVPARFSGSLIGDKAALTITGAQTEDEAIYFCALWYSNLWVFGGGTKLTVLGGGGSGGGGSGGGGSEVQLVESGGGLVQPKGSLKLSCAASGFTFNTYAMNWVRQAPGKGLEWVARIRSKYNNYATYYADSVKDRFTISRDDSQSILYLQMNNLKTEDTAMYYCVRHGNFGNSYVSWFAYWGQGTLVTVSA

SEQ ID NO: 561 - DNA, 1569 bp, Artificial Sequence
  Synthetic polynucleotide
tttatgtgccagcagcggatgtgggggaatgagttttgccatcagggctcgagcggtggcagcggtggctctggtggtctgagcggccgttccgataatcatggcggcggttctcaggctgtcgtgacacaggaaagcgccctgaccaccagccctggcgagacagtgaccctgacctgcagatctagcacaggcgccgtgaccacaagcaactacgccaactgggtgcaggaaaagcccgaccacctgttcaccggcctgatcggcggcaccaacaaaagggctccaggcgtgccagccagattcagcggcagcctgattggcgataaggccgccctgacaatcactggcgcccagaccgaggacgaggccatctacttttgcgccctgtggtacagcaacctgtgggtgttcggcggaggcaccaagctgacagtgctgggaggcggaggatctggcggaggcggaagtggcggagggggatctgaagtgcagctggtggaatctggcggcggactggtgcagcctaagggctctctgaagctgagctgtgccgccagcggcttcaccttcaacacctacgccatgaattgggtgcgccaggcccctggcaagggactggaatgggtggcccggatcagaagcaagtacaacaattacgccacctactacgccgacagcgtgaaggaccggttcaccatcagccgggacgacagccagagcatcctgtatctgcagatgaacaacctgaaaaccgaggacaccgccatgtactactgcgtgcggcacggcaacttcggcaacagctatgtgtcttggtttgcctactggggccagggcaccctcgtgacagtgtctgctggcggctccctggaccctaagtcatctgacaaaactcacacatgcccaccgtgcccagcacctgaactcctggggggaccgtcagtcttcctcttccccccaaaacccaaggacaccctcatgatctcccggacccctgaggtcacatgcgtggtggtggacgtgagccacgaagaccctgaggtcaagttcaactggtacgtggacggcgtggaggtgcataatgccaagacaaagccgcgggaggagcagtacaacagcacgtaccgtgtggtcagcgtcctcaccgtcctgcaccaggactggctgaatggcaaggagtacaagtgcaaggtctccaacaaagccctcccagcccccatcgagaaaaccatctccaaagccaaagggcagccccgagaaccacaggtgtacaccctgcccccatcccgggaggagatgaccaagaaccaggtcagcctgacctgcctggtcaaaggcttctatcccagcgacatcgccgtggagtgggagagcaatgggcagccggagaacaactacaagaccacgcctcccgtgctggactccgacggctccttcttcctctacagcaagctcaccgtggacaagagcaggtggcagcaggggaacgtcttctcatgctccgtgatgcatgaggctctgcacaaccactacacgcagaagagcctctccctgtctccgggtaaa

SEQ ID NO: 562 - protein, 523 aa, Artificial Sequence
  Synthetic polypeptide
FMCQQRMWGNEFCHQGSSGGSGGSGGLSGRSDNHGGGSQAVVTQESALTTSPGETVTLTCRSSTGAVTTSNYANWVQEKPDHLFTGLIGGTNKRAPGVPARFSGSLIGDKAALTITGAQTEDEAIYFCALWYSNLWVFGGGTKLTVLGGGGSGGGGSGGGGSEVQLVESGGGLVQPKGSLKLSCAASGFTFNTYAMNWVRQAPGKGLEWVARIRSKYNNYATYYADSVKDRFTISRDDSQSILYLQMNNLKTEDTAMYYCVRHGNFGNSYVSWFAYWGQGTLVTVSAGGSLDPKSSDKTHTCPPCPAPELLGGPSVFLFPPKPKDTLMISRTPEVTCVVVDVSHEDPEVKFNWYVDGVEVHNAKTKPREEQYNSTYRVVSVLTVLHQDWLNGKEYKCKVSNKALPAPIEKTISKAKGQPREPQVYTLPPSREEMTKNQVSLTCLVKGFYPSDIAVEWESNGQPENNYKTTPPVLDSDGSFFLYSKLTVDKSRWQQGNVFSCSVMHEALHNHYTQKSLSLSPGK

SEQ ID NO: 563 - DNA, 861 bp, Artificial Sequence
  Synthetic polynucleotide
atgatgtattgcggtgggaatgaggtgttgtgcgggccgcgggttggctcgagcggtggcagcggtggctctggtggtctgagcggccgttccgataatcatggcggcggttctcaggctgtcgtgacacaggaaagcgccctgaccaccagccctggcgagacagtgaccctgacctgcagatctagcacaggcgccgtgaccacaagcaactacgccaactgggtgcaggaaaagcccgaccacctgttcaccggcctgatcggcggcaccaacaaaagggctccaggcgtgccagccagattcagcggcagcctgattggcgataaggccgccctgacaatcactggcgcccagaccgaggacgaggccatctacttttgcgccctgtggtacagcaacctgtgggtgttcggcggaggcaccaagctgacagtgctgggaggcggaggatctggcggaggcggaagtggcggagggggatctgaagtgcagctggtggaatctggcggcggactggtgcagcctaagggctctctgaagctgagctgtgccgccagcggcttcaccttcaacacctacgccatgaattgggtgcgccaggcccctggcaagggactggaatgggtggcccggatcagaagcaagtacaacaattacgccacctactacgccgacagcgtgaaggaccggttcaccatcagccgggacgacagccagagcatcctgtatctgcagatgaacaacctgaaaaccgaggacaccgccatgtactactgcgtgcggcacggcaacttcggcaacagctatgtgtcttggtttgcctactggggccagggcaccctcgtgacagtgtctgct

SEQ ID NO: 564 - protein, 287 aa, Artificial Sequence
  Synthetic polypeptide
MMYCGGNEVLCGPRVGSSGGSGGSGGLSGRSDNHGGGSQAVVTQESALTTSPGETVTLTCRSSTGAVTTSNYANWVQEKPDHLFTGLIGGTNKRAPGVPARFSGSLIGDKAALTITGAQTEDEAIYFCALWYSNLWVFGGGTKLTVLGGGGSGGGGSGGGGSEVQLVESGGGLVQPKGSLKLSCAASGFTFNTYAMNWVRQAPGKGLEWVARIRSKYNNYATYYADSVKDRFTISRDDSQSILYLQMNNLKTEDTAMYYCVRHGNFGNSYVSWFAYWGQGTLVTVSA

SEQ ID NO: 565 - DNA, 1569 bp, Artificial Sequence
  Synthetic polynucleotide
atgatgtattgcggtgggaatgaggtgttgtgcgggccgcgggttggctcgagcggtggcagcggtggctctggtggtctgagcggccgttccgataatcatggcggcggttctcaggctgtcgtgacacaggaaagcgccctgaccaccagccctggcgagacagtgaccctgacctgcagatctagcacaggcgccgtgaccacaagcaactacgccaactgggtgcaggaaaagcccgaccacctgttcaccggcctgatcggcggcaccaacaaaagggctccaggcgtgccagccagattcagcggcagcctgattggcgataaggccgccctgacaatcactggcgcccagaccgaggacgaggccatctacttttgcgccctgtggtacagcaacctgtgggtgttcggcggaggcaccaagctgacagtgctgggaggcggaggatctggcggaggcggaagtggcggagggggatctgaagtgcagctggtggaatctggcggcggactggtgcagcctaagggctctctgaagctgagctgtgccgccagcggcttcaccttcaacacctacgccatgaattgggtgcgccaggcccctggcaagggactggaatgggtggcccggatcagaagcaagtacaacaattacgccacctactacgccgacagcgtgaaggaccggttcaccatcagccgggacgacagccagagcatcctgtatctgcagatgaacaacctgaaaaccgaggacaccgccatgtactactgcgtgcggcacggcaacttcggcaacagctatgtgtcttggtttgcctactggggccagggcaccctcgtgacagtgtctgctggcggctccctggaccctaagtcatctgacaaaactcacacatgcccaccgtgcccagcacctgaactcctggggggaccgtcagtcttcctcttccccccaaaacccaaggacaccctcatgatctcccggacccctgaggtcacatgcgtggtggtggacgtgagccacgaagaccctgaggtcaagttcaactggtacgtggacggcgtggaggtgcataatgccaagacaaagccgcgggaggagcagtacaacagcacgtaccgtgtggtcagcgtcctcaccgtcctgcaccaggactggctgaatggcaaggagtacaagtgcaaggtctccaacaaagccctcccagcccccatcgagaaaaccatctccaaagccaaagggcagccccgagaaccacaggtgtacaccctgcccccatcccgggaggagatgaccaagaaccaggtcagcctgacctgcctggtcaaaggcttctatcccagcgacatcgccgtggagtgggagagcaatgggcagccggagaacaactacaagaccacgcctcccgtgctggactccgacggctccttcttcctctacagcaagctcaccgtggacaagagcaggtggcagcaggggaacgtcttctcatgctccgtgatgcatgaggctctgcacaaccactacacgcagaagagcctctccctgtctccgggtaaa

SEQ ID NO: 566 - protein, 523 aa, Artificial Sequence
  Synthetic polypeptide
MMYCGGNEVLCGPRVGSSGGSGGSGGLSGRSDNHGGGSQAVVTQESALTTSPGETVTLTCRSSTGAVTTSNYANWVQEKPDHLFTGLIGGTNKRAPGVPARFSGSLIGDKAALTITGAQTEDEAIYFCALWYSNLWVFGGGTKLTVLGGGGSGGGGSGGGGSEVQLVESGGGLVQPKGSLKLSCAASGFTFNTYAMNWVRQAPGKGLEWVARIRSKYNNYATYYADSVKDRFTISRDDSQSILYLQMNNLKTEDTAMYYCVRHGNFGNSYVSWFAYWGQGTLVTVSAGGSLDPKSSDKTHTCPPCPAPELLGGPSVFLFPPKPKDTLMISRTPEVTCVVVDVSHEDPEVKFNWYVDGVEVHNAKTKPREEQYNSTYRVVSVLTVLHQDWLNGKEYKCKVSNKALPAPIEKTISKAKGQPREPQVYTLPPSREEMTKNQVSLTCLVKGFYPSDIAVEWESNGQPENNYKTTPPVLDSDGSFFLYSKLTVDKSRWQQGNVFSCSVMHEALHNHYTQKSLSLSPGK

SEQ ID NO: 567 - DNA, 861 bp, Artificial Sequence
  Synthetic polynucleotide
ggttatcggtggggttgcgagtggaattgcggtgggattactactggctcgagcggtggcagcggtggctctggtggtctgagcggccgttccgataatcatggcggcggttctgaagtgcagctggtggaatctgggggcggactggtgcagcctaagggcagcctgaagctgagctgtgccgccagcggcttcaccttcaacacctacgccatgaactgggtgcgccaggcccctggcaaaggcctggaatgggtggcccggatcagaagcaagtacaacaattacgccacctactacgccgacagcgtgaaggacagattcaccatcagccgggacgacagccagagcatcctgtacctgcagatgaacaacctgaaaaccgaggacaccgccatgtactactgcgtgcggcacggcaacttcggcaacagctatgtgtcttggtttgcctactggggccagggcaccctcgtgacagtgtctgccggtggtggtggtagtggtggcggtggttcaggcggtggcggtagccaggctgtcgtgacacaggaaagcgccctgaccaccagccctggcgagacagtgaccctgacctgtagaagcagcacaggcgccgtgaccacaagcaactacgccaattgggtgcaggaaaagcccgaccacctgttcaccggcctgatcggcggcaccaacaaaagggctccaggcgtgccagccagattcagcggctccctgatcggagataaggccgccctgacaatcactggcgcccagaccgaggacgaggccatctacttttgcgccctgtggtacagcaacctgtgggtgttcggcggaggcaccaagctgaccgtgctg

SEQ ID NO: 568 - protein, 287 aa, Artificial Sequence
  Synthetic polypeptide
GYRWGCEWNCGGITTGSSGGSGGSGGLSGRSDNHGGGSEVQLVESGGGLVQPKGSLKLSCAASGFTFNTYAMNWVRQAPGKGLEWVARIRSKYNNYATYYADSVKDRFTISRDDSQSILYLQMNNLKTEDTAMYYCVRHGNFGNSYVSWFAYWGQGTLVTVSAGGGGSGGGGSGGGGSQAVVTQESALTTSPGETVTLTCRSSTGAVTTSNYANWVQEKPDHLFTGLIGGTNKRAPGVPARFSGSLIGDKAALTITGAQTEDEAIYFCALWYSNLWVFGGGTKLTVL

SEQ ID NO: 569 - DNA, 1569 bp, Artificial Sequence
  Synthetic polynucleotide
ggttatcggtggggttgcgagtggaattgcggtgggattactactggctcgagcggtggcagcggtggctctggtggtctgagcggccgttccgataatcatggcggcggttctgaagtgcagctggtggaatctgggggcggactggtgcagcctaagggcagcctgaagctgagctgtgccgccagcggcttcaccttcaacacctacgccatgaactgggtgcgccaggcccctggcaaaggcctggaatgggtggcccggatcagaagcaagtacaacaattacgccacctactacgccgacagcgtgaaggacagattcaccatcagccgggacgacagccagagcatcctgtacctgcagatgaacaacctgaaaaccgaggacaccgccatgtactactgcgtgcggcacggcaacttcggcaacagctatgtgtcttggtttgcctactggggccagggcaccctcgtgacagtgtctgccggtggtggtggtagtggtggcggtggttcaggcggtggcggtagccaggctgtcgtgacacaggaaagcgccctgaccaccagccctggcgagacagtgaccctgacctgtagaagcagcacaggcgccgtgaccacaagcaactacgccaattgggtgcaggaaaagcccgaccacctgttcaccggcctgatcggcggcaccaacaaaagggctccaggcgtgccagccagattcagcggctccctgatcggagataaggccgccctgacaatcactggcgcccagaccgaggacgaggccatctacttttgcgccctgtggtacagcaacctgtgggtgttcggcggaggcaccaagctgaccgtgctgggcggctccctggaccctaagtcatctgacaaaactcacacatgcccaccgtgcccagcacctgaactcctggggggaccgtcagtcttcctcttccccccaaaacccaaggacaccctcatgatctcccggacccctgaggtcacatgcgtggtggtggacgtgagccacgaagaccctgaggtcaagttcaactggtacgtggacggcgtggaggtgcataatgccaagacaaagccgcgggaggagcagtacaacagcacgtaccgtgtggtcagcgtcctcaccgtcctgcaccaggactggctgaatggcaaggagtacaagtgcaaggtctccaacaaagccctcccagcccccatcgagaaaaccatctccaaagccaaagggcagccccgagaaccacaggtgtacaccctgcccccatcccgggaggagatgaccaagaaccaggtcagcctgacctgcctggtcaaaggcttctatcccagcgacatcgccgtggagtgggagagcaatgggcagccggagaacaactacaagaccacgcctcccgtgctggactccgacggctccttcttcctctacagcaagctcaccgtggacaagagcaggtggcagcaggggaacgtcttctcatgctccgtgatgcatgaggctctgcacaaccactacacgcagaagagcctctccctgtctccgggtaaa

SEQ ID NO: 570 - protein, 523 aa, Artificial Sequence
  Synthetic polypeptide
GYRWGCEWNCGGITTGSSGGSGGSGGLSGRSDNHGGGSEVQLVESGGGLVQPKGSLKLSCAASGFTFNTYAMNWVRQAPGKGLEWVARIRSKYNNYATYYADSVKDRFTISRDDSQSILYLQMNNLKTEDTAMYYCVRHGNFGNSYVSWFAYWGQGTLVTVSAGGGGSGGGGSGGGGSQAVVTQESALTTSPGETVTLTCRSSTGAVTTSNYANWVQEKPDHLFTGLIGGTNKRAPGVPARFSGSLIGDKAALTITGAQTEDEAIYFCALWYSNLWVFGGGTKLTVLGGSLDPKSSDKTHTCPPCPAPELLGGPSVFLFPPKPKDTLMISRTPEVTCVVVDVSHEDPEVKFNWYVDGVEVHNAKTKPREEQYNSTYRVVSVLTVLHQDWLNGKEYKCKVSNKALPAPIEKTISKAKGQPREPQVYTLPPSREEMTKNQVSLTCLVKGFYPSDIAVEWESNGQPENNYKTTPPVLDSDGSFFLYSKLTVDKSRWQQGNVFSCSVMHEALHNHYTQKSLSLSPGK

SEQ ID NO: 571 - DNA, 861 bp, Artificial Sequence
  Synthetic polynucleotide
tggtattcgggtgggtgcgaggctttttgcggtattttgtcgtcgggctcgagcggtggcagcggtggctctggtggtctgagcggccgttccgataatcatggcggcggttctgaagtgcagctggtggaatctgggggcggactggtgcagcctaagggcagcctgaagctgagctgtgccgccagcggcttcaccttcaacacctacgccatgaactgggtgcgccaggcccctggcaaaggcctggaatgggtggcccggatcagaagcaagtacaacaattacgccacctactacgccgacagcgtgaaggacagattcaccatcagccgggacgacagccagagcatcctgtacctgcagatgaacaacctgaaaaccgaggacaccgccatgtactactgcgtgcggcacggcaacttcggcaacagctatgtgtcttggtttgcctactggggccagggcaccctcgtgacagtgtctgccggtggtggtggtagtggtggcggtggttcaggcggtggcggtagccaggctgtcgtgacacaggaaagcgccctgaccaccagccctggcgagacagtgaccctgacctgtagaagcagcacaggcgccgtgaccacaagcaactacgccaattgggtgcaggaaaagcccgaccacctgttcaccggcctgatcggcggcaccaacaaaagggctccaggcgtgccagccagattcagcggctccctgatcggagataaggccgccctgacaatcactggcgcccagaccgaggacgaggccatctacttttgcgccctgtggtacagcaacctgtgggtgttcggcggaggcaccaagctgaccgtgctg

SEQ ID NO: 572 - protein, 287 aa, Artificial Sequence
  Synthetic polypeptide
WYSGGCEAFCGILSSGSSGGSGGSGGLSGRSDNHGGGSEVQLVESGGGLVQPKGSLKLSCAASGFTFNTYAMNWVRQAPGKGLEWVARIRSKYNNYATYYADSVKDRFTISRDDSQSILYLQMNNLKTEDTAMYYCVRHGNFGNSYVSWFAYWGQGTLVTVSAGGGGSGGGGSGGGGSQAVVTQESALTTSPGETVTLTCRSSTGAVTTSNYANWVQEKPDHLFTGLIGGTNKRAPGVPARFSGSLIGDKAALTITGAQTEDEAIYFCALWYSNLWVFGGGTKLTVL

SEQ ID NO: 573 - DNA, 1569 bp, Artificial Sequence
  Synthetic polynucleotide
tggtattcgggtgggtgcgaggctttttgcggtattttgtcgtcgggctcgagcggtggcagcggtggctctggtggtctgagcggccgttccgataatcatggcggcggttctgaagtgcagctggtggaatctgggggcggactggtgcagcctaagggcagcctgaagctgagctgtgccgccagcggcttcaccttcaacacctacgccatgaactgggtgcgccaggcccctggcaaaggcctggaatgggtggcccggatcagaagcaagtacaacaattacgccacctactacgccgacagcgtgaaggacagattcaccatcagccgggacgacagccagagcatcctgtacctgcagatgaacaacctgaaaaccgaggacaccgccatgtactactgcgtgcggcacggcaacttcggcaacagctatgtgtcttggtttgcctactggggccagggcaccctcgtgacagtgtctgccggtggtggtggtagtggtggcggtggttcaggcggtggcggtagccaggctgtcgtgacacaggaaagcgccctgaccaccagccctggcgagacagtgaccctgacctgtagaagcagcacaggcgccgtgaccacaagcaactacgccaattgggtgcaggaaaagcccgaccacctgttcaccggcctgatcggcggcaccaacaaaagggctccaggcgtgccagccagattcagcggctccctgatcggagataaggccgccctgacaatcactggcgcccagaccgaggacgaggccatctacttttgcgccctgtggtacagcaacctgtgggtgttcggcggaggcaccaagctgaccgtgctgggcggctccctggaccctaagtcatctgacaaaactcacacatgcccaccgtgcccagcacctgaactcctggggggaccgtcagtcttcctcttccccccaaaacccaaggacaccctcatgatctcccggacccctgaggtcacatgcgtggtggtggacgtgagccacgaagaccctgaggtcaagttcaactggtacgtggacggcgtggaggtgcataatgccaagacaaagccgcgggaggagcagtacaacagcacgtaccgtgtggtcagcgtcctcaccgtcctgcaccaggactggctgaatggcaaggagtacaagtgcaaggtctccaacaaagccctcccagcccccatcgagaaaaccatctccaaagccaaagggcagccccgagaaccacaggtgtacaccctgcccccatcccgggaggagatgaccaagaaccaggtcagcctgacctgcctggtcaaaggcttctatcccagcgacatcgccgtggagtgggagagcaatgggcagccggagaacaactacaagaccacgcctcccgtgctggactccgacggctccttcttcctctacagcaagctcaccgtggacaagagcaggtggcagcaggggaacgtcttctcatgctccgtgatgcatgaggctctgcacaaccactacacgcagaagagcctctccctgtctccgggtaaa

SEQ ID NO: 574 - protein, 523 aa, Artificial Sequence
  Synthetic polypeptide
WYSGGCEAFCGILSSGSSGGSGGSGGLSGRSDNHGGGSEVQLVESGGGLVQPKGSLKLSCAASGFTFNTYAMNWVRQAPGKGLEWVARIRSKYNNYATYYADSVKDRFTISRDDSQSILYLQMNNLKTEDTAMYYCVRHGNFGNSYVSWFAYWGQGTLVTVSAGGGGSGGGGSGGGGSQAVVTQESALTTSPGETVTLTCRSSTGAVTTSNYANWVQEKPDHLFTGLIGGTNKRAPGVPARFSGSLIGDKAALTITGAQTEDEAIYFCALWYSNLWVFGGGTKLTVLGGSLDPKSSDKTHTCPPCPAPELLGGPSVFLFPPKPKDTLMISRTPEVTCVVVDVSHEDPEVKFNWYVDGVEVHNAKTKPREEQYNSTYRVVSVLTVLHQDWLNGKEYKCKVSNKALPAPIEKTISKAKGQPREPQVYTLPPSREEMTKNQVSLTCLVKGFYPSDIAVEWESNGQPENNYKTTPPVLDSDGSFFLYSKLTVDKSRWQQGNVFSCSVMHEALHNHYTQKSLSLSPGK

SEQ ID NO: 575 - DNA, 861 bp, Artificial Sequence
  Synthetic polynucleotide
gtttattattgcggtgggaatgagagtctgtgcggtgagaggaggggctcgagcggtggcagcggtggctctggtggtctgagcggccgttccgataatcatggcggcggttctgaagtgcagctggtggaatctgggggcggactggtgcagcctaagggcagcctgaagctgagctgtgccgccagcggcttcaccttcaacacctacgccatgaactgggtgcgccaggcccctggcaaaggcctggaatgggtggcccggatcagaagcaagtacaacaattacgccacctactacgccgacagcgtgaaggacagattcaccatcagccgggacgacagccagagcatcctgtacctgcagatgaacaacctgaaaaccgaggacaccgccatgtactactgcgtgcggcacggcaacttcggcaacagctatgtgtcttggtttgcctactggggccagggcaccctcgtgacagtgtctgccggtggtggtggtagtggtggcggtggttcaggcggtggcggtagccaggctgtcgtgacacaggaaagcgccctgaccaccagccctggcgagacagtgaccctgacctgtagaagcagcacaggcgccgtgaccacaagcaactacgccaattgggtgcaggaaaagcccgaccacctgttcaccggcctgatcggcggcaccaacaaaagggctccaggcgtgccagccagattcagcggctccctgatcggagataaggccgccctgacaatcactggcgcccagaccgaggacgaggccatctacttttgcgccctgtggtacagcaacctgtgggtgttcggcggaggcaccaagctgaccgtgctg

SEQ ID NO: 576 - protein, 287 aa, Artificial Sequence
  Synthetic polypeptide
VYYCGGNESLCGERRGSSGGSGGSGGLSGRSDNHGGGSEVQLVESGGGLVQPKGSLKLSCAASGFTFNTYAMNWVRQAPGKGLEWVARIRSKYNNYATYYADSVKDRFTISRDDSQSILYLQMNNLKTEDTAMYYCVRHGNFGNSYVSWFAYWGQGTLVTVSAGGGGSGGGGSGGGGSQAVVTQESALTTSPGETVTLTCRSSTGAVTTSNYANWVQEKPDHLFTGLIGGTNKRAPGVPARFSGSLIGDKAALTITGAQTEDEAIYFCALWYSNLWVFGGGTKLTVL

SEQ ID NO: 577 - DNA, 1569 bp, Artificial Sequence
  Synthetic polynucleotide
gtttattattgcggtgggaatgagagtctgtgcggtgagaggaggggctcgagcggtggcagcggtggctctggtggtctgagcggccgttccgataatcatggcggcggttctgaagtgcagctggtggaatctgggggcggactggtgcagcctaagggcagcctgaagctgagctgtgccgccagcggcttcaccttcaacacctacgccatgaactgggtgcgccaggcccctggcaaaggcctggaatgggtggcccggatcagaagcaagtacaacaattacgccacctactacgccgacagcgtgaaggacagattcaccatcagccgggacgacagccagagcatcctgtacctgcagatgaacaacctgaaaaccgaggacaccgccatgtactactgcgtgcggcacggcaacttcggcaacagctatgtgtcttggtttgcctactggggccagggcaccctcgtgacagtgtctgccggtggtggtggtagtggtggcggtggttcaggcggtggcggtagccaggctgtcgtgacacaggaaagcgccctgaccaccagccctggcgagacagtgaccctgacctgtagaagcagcacaggcgccgtgaccacaagcaactacgccaattgggtgcaggaaaagcccgaccacctgttcaccggcctgatcggcggcaccaacaaaagggctccaggcgtgccagccagattcagcggctccctgatcggagataaggccgccctgacaatcactggcgcccagaccgaggacgaggccatctacttttgcgccctgtggtacagcaacctgtgggtgttcggcggaggcaccaagctgaccgtgctgggcggctccctggaccctaagtcatctgacaaaactcacacatgcccaccgtgcccagcacctgaactcctggggggaccgtcagtcttcctcttccccccaaaacccaaggacaccctcatgatctcccggacccctgaggtcacatgcgtggtggtggacgtgagccacgaagaccctgaggtcaagttcaactggtacgtggacggcgtggaggtgcataatgccaagacaaagccgcgggaggagcagtacaacagcacgtaccgtgtggtcagcgtcctcaccgtcctgcaccaggactggctgaatggcaaggagtacaagtgcaaggtctccaacaaagccctcccagcccccatcgagaaaaccatctccaaagccaaagggcagccccgagaaccacaggtgtacaccctgcccccatcccgggaggagatgaccaagaaccaggtcagcctgacctgcctggtcaaaggcttctatcccagcgacatcgccgtggagtgggagagcaatgggcagccggagaacaactacaagaccacgcctcccgtgctggactccgacggctccttcttcctctacagcaagctcaccgtggacaagagcaggtggcagcaggggaacgtcttctcatgctccgtgatgcatgaggctctgcacaaccactacacgcagaagagcctctccctgtctccgggtaaa

SEQ ID NO: 578 - protein, 523 aa, Artificial Sequence
  Synthetic polypeptide
VYYCGGNESLCGERRGSSGGSGGSGGLSGRSDNHGGGSEVQLVESGGGLVQPKGSLKLSCAASGFTFNTYAMNWVRQAPGKGLEWVARIRSKYNNYATYYADSVKDRFTISRDDSQSILYLQMNNLKTEDTAMYYCVRHGNFGNSYVSWFAYWGQGTLVTVSAGGGGSGGGGSGGGGSQAVVTQESALTTSPGETVTLTCRSSTGAVTTSNYANWVQEKPDHLFTGLIGGTNKRAPGVPARFSGSLIGDKAALTITGAQTEDEAIYFCALWYSNLWVFGGGTKLTVLGGSLDPKSSDKTHTCPPCPAPELLGGPSVFLFPPKPKDTLMISRTPEVTCVVVDVSHEDPEVKFNWYVDGVEVHNAKTKPREEQYNSTYRVVSVLTVLHQDWLNGKEYKCKVSNKALPAPIEKTISKAKGQPREPQVYTLPPSREEMTKNQVSLTCLVKGFYPSDIAVEWESNGQPENNYKTTPPVLDSDGSFFLYSKLTVDKSRWQQGNVFSCSVMHEALHNHYTQKSLSLSPGK

SEQ ID NO: 579 - DNA, 861 bp, Artificial Sequence
  Synthetic polynucleotide
tttatgtgccagcagcggatgtgggggaatgagttttgccatcagggctcgagcggtggcagcggtggctctggtggtctgagcggccgttccgataatcatggcggcggttctgaagtgcagctggtggaatctgggggcggactggtgcagcctaagggcagcctgaagctgagctgtgccgccagcggcttcaccttcaacacctacgccatgaactgggtgcgccaggcccctggcaaaggcctggaatgggtggcccggatcagaagcaagtacaacaattacgccacctactacgccgacagcgtgaaggacagattcaccatcagccgggacgacagccagagcatcctgtacctgcagatgaacaacctgaaaaccgaggacaccgccatgtactactgcgtgcggcacggcaacttcggcaacagctatgtgtcttggtttgcctactggggccagggcaccctcgtgacagtgtctgccggtggtggtggtagtggtggcggtggttcaggcggtggcggtagccaggctgtcgtgacacaggaaagcgccctgaccaccagccctggcgagacagtgaccctgacctgtagaagcagcacaggcgccgtgaccacaagcaactacgccaattgggtgcaggaaaagcccgaccacctgttcaccggcctgatcggcggcaccaacaaaagggctccaggcgtgccagccagattcagcggctccctgatcggagataaggccgccctgacaatcactggcgcccagaccgaggacgaggccatctacttttgcgccctgtggtacagcaacctgtgggtgttcggcggaggcaccaagctgaccgtgctg

SEQ ID NO: 580 - protein, 287 aa, Artificial Sequence
  Synthetic polypeptide
FMCQQRMWGNEFCHQGSSGGSGGSGGLSGRSDNHGGGSEVQLVESGGGLVQPKGSLKLSCAASGFTFNTYAMNWVRQAPGKGLEWVARIRSKYNNYATYYADSVKDRFTISRDDSQSILYLQMNNLKTEDTAMYYCVRHGNFGNSYVSWFAYWGQGTLVTVSAGGGGSGGGGSGGGGSQAVVTQESALTTSPGETVTLTCRSSTGAVTTSNYANWVQEKPDHLFTGLIGGTNKRAPGVPARFSGSLIGDKAALTITGAQTEDEAIYFCALWYSNLWVFGGGTKLTVL

SEQ ID NO: 581 - DNA, 1569 bp, Artificial Sequence
  Synthetic polynucleotide
tttatgtgccagcagcggatgtgggggaatgagttttgccatcagggctcgagcggtggcagcggtggctctggtggtctgagcggccgttccgataatcatggcggcggttctgaagtgcagctggtggaatctgggggcggactggtgcagcctaagggcagcctgaagctgagctgtgccgccagcggcttcaccttcaacacctacgccatgaactgggtgcgccaggcccctggcaaaggcctggaatgggtggcccggatcagaagcaagtacaacaattacgccacctactacgccgacagcgtgaaggacagattcaccatcagccgggacgacagccagagcatcctgtacctgcagatgaacaacctgaaaaccgaggacaccgccatgtactactgcgtgcggcacggcaacttcggcaacagctatgtgtcttggtttgcctactggggccagggcaccctcgtgacagtgtctgccggtggtggtggtagtggtggcggtggttcaggcggtggcggtagccaggctgtcgtgacacaggaaagcgccctgaccaccagccctggcgagacagtgaccctgacctgtagaagcagcacaggcgccgtgaccacaagcaactacgccaattgggtgcaggaaaagcccgaccacctgttcaccggcctgatcggcggcaccaacaaaagggctccaggcgtgccagccagattcagcggctccctgatcggagataaggccgccctgacaatcactggcgcccagaccgaggacgaggccatctacttttgcgccctgtggtacagcaacctgtgggtgttcggcggaggcaccaagctgaccgtgctgggcggctccctggaccctaagtcatctgacaaaactcacacatgcccaccgtgcccagcacctgaactcctggggggaccgtcagtcttcctcttccccccaaaacccaaggacaccctcatgatctcccggacccctgaggtcacatgcgtggtggtggacgtgagccacgaagaccctgaggtcaagttcaactggtacgtggacggcgtggaggtgcataatgccaagacaaagccgcgggaggagcagtacaacagcacgtaccgtgtggtcagcgtcctcaccgtcctgcaccaggactggctgaatggcaaggagtacaagtgcaaggtctccaacaaagccctcccagcccccatcgagaaaaccatctccaaagccaaagggcagccccgagaaccacaggtgtacaccctgcccccatcccgggaggagatgaccaagaaccaggtcagcctgacctgcctggtcaaaggcttctatcccagcgacatcgccgtggagtgggagagcaatgggcagccggagaacaactacaagaccacgcctcccgtgctggactccgacggctccttcttcctctacagcaagctcaccgtggacaagagcaggtggcagcaggggaacgtcttctcatgctccgtgatgcatgaggctctgcacaaccactacacgcagaagagcctctccctgtctccgggtaaa

SEQ ID NO: 582 - protein, 523 aa, Artificial Sequence
  Synthetic polypeptide
FMCQQRMWGNEFCHQGSSGGSGGSGGLSGRSDNHGGGSEVQLVESGGGLVQPKGSLKLSCAASGFTFNTYAMNWVRQAPGKGLEWVARIRSKYNNYATYYADSVKDRFTISRDDSQSILYLQMNNLKTEDTAMYYCVRHGNFGNSYVSWFAYWGQGTLVTVSAGGGGSGGGGSGGGGSQAVVTQESALTTSPGETVTLTCRSSTGAVTTSNYANWVQEKPDHLFTGLIGGTNKRAPGVPARFSGSLIGDKAALTITGAQTEDEAIYFCALWYSNLWVFGGGTKLTVLGGSLDPKSSDKTHTCPPCPAPELLGGPSVFLFPPKPKDTLMISRTPEVTCVVVDVSHEDPEVKFNWYVDGVEVHNAKTKPREEQYNSTYRVVSVLTVLHQDWLNGKEYKCKVSNKALPAPIEKTISKAKGQPREPQVYTLPPSREEMTKNQVSLTCLVKGFYPSDIAVEWESNGQPENNYKTTPPVLDSDGSFFLYSKLTVDKSRWQQGNVFSCSVMHEALHNHYTQKSLSLSPGK

SEQ ID NO: 583 - DNA, 861 bp, Artificial Sequence
  Synthetic polynucleotide
atgatgtattgcggtgggaatgaggtgttgtgcgggccgcgggttggctcgagcggtggcagcggtggctctggtggtctgagcggccgttccgataatcatggcggcggttctgaagtgcagctggtggaatctgggggcggactggtgcagcctaagggcagcctgaagctgagctgtgccgccagcggcttcaccttcaacacctacgccatgaactgggtgcgccaggcccctggcaaaggcctggaatgggtggcccggatcagaagcaagtacaacaattacgccacctactacgccgacagcgtgaaggacagattcaccatcagccgggacgacagccagagcatcctgtacctgcagatgaacaacctgaaaaccgaggacaccgccatgtactactgcgtgcggcacggcaacttcggcaacagctatgtgtcttggtttgcctactggggccagggcaccctcgtgacagtgtctgccggtggtggtggtagtggtggcggtggttcaggcggtggcggtagccaggctgtcgtgacacaggaaagcgccctgaccaccagccctggcgagacagtgaccctgacctgtagaagcagcacaggcgccgtgaccacaagcaactacgccaattgggtgcaggaaaagcccgaccacctgttcaccggcctgatcggcggcaccaacaaaagggctccaggcgtgccagccagattcagcggctccctgatcggagataaggccgccctgacaatcactggcgcccagaccgaggacgaggccatctacttttgcgccctgtggtacagcaacctgtgggtgttcggcggaggcaccaagctgaccgtgctg

SEQ ID NO: 584 - protein, 287 aa, Artificial Sequence
  Synthetic polypeptide
MMYCGGNEVLCGPRVGSSGGSGGSGGLSGRSDNHGGGSEVQLVESGGGLVQPKGSLKLSCAASGFTFNTYAMNWVRQAPGKGLEWVARIRSKYNNYATYYADSVKDRFTISRDDSQSILYLQMNNLKTEDTAMYYCVRHGNFGNSYVSWFAYWGQGTLVTVSAGGGGSGGGGSGGGGSQAVVTQESALTTSPGETVTLTCRSSTGAVTTSNYANWVQEKPDHLFTGLIGGTNKRAPGVPARFSGSLIGDKAALTITGAQTEDEAIYFCALWYSNLWVFGGGTKLTVL

SEQ ID NO: 585 - DNA, 1569 bp, Artificial Sequence
  Synthetic polynucleotide
atgatgtattgcggtgggaatgaggtgttgtgcgggccgcgggttggctcgagcggtggcagcggtggctctggtggtctgagcggccgttccgataatcatggcggcggttctgaagtgcagctggtggaatctgggggcggactggtgcagcctaagggcagcctgaagctgagctgtgccgccagcggcttcaccttcaacacctacgccatgaactgggtgcgccaggcccctggcaaaggcctggaatgggtggcccggatcagaagcaagtacaacaattacgccacctactacgccgacagcgtgaaggacagattcaccatcagccgggacgacagccagagcatcctgtacctgcagatgaacaacctgaaaaccgaggacaccgccatgtactactgcgtgcggcacggcaacttcggcaacagctatgtgtcttggtttgcctactggggccagggcaccctcgtgacagtgtctgccggtggtggtggtagtggtggcggtggttcaggcggtggcggtagccaggctgtcgtgacacaggaaagcgccctgaccaccagccctggcgagacagtgaccctgacctgtagaagcagcacaggcgccgtgaccacaagcaactacgccaattgggtgcaggaaaagcccgaccacctgttcaccggcctgatcggcggcaccaacaaaagggctccaggcgtgccagccagattcagcggctccctgatcggagataaggccgccctgacaatcactggcgcccagaccgaggacgaggccatctacttttgcgccctgtggtacagcaacctgtgggtgttcggcggaggcaccaagctgaccgtgctgggcggctccctggaccctaagtcatctgacaaaactcacacatgcccaccgtgcccagcacctgaactcctggggggaccgtcagtcttcctcttccccccaaaacccaaggacaccctcatgatctcccggacccctgaggtcacatgcgtggtggtggacgtgagccacgaagaccctgaggtcaagttcaactggtacgtggacggcgtggaggtgcataatgccaagacaaagccgcgggaggagcagtacaacagcacgtaccgtgtggtcagcgtcctcaccgtcctgcaccaggactggctgaatggcaaggagtacaagtgcaaggtctccaacaaagccctcccagcccccatcgagaaaaccatctccaaagccaaagggcagccccgagaaccacaggtgtacaccctgcccccatcccgggaggagatgaccaagaaccaggtcagcctgacctgcctggtcaaaggcttctatcccagcgacatcgccgtggagtgggagagcaatgggcagccggagaacaactacaagaccacgcctcccgtgctggactccgacggctccttcttcctctacagcaagctcaccgtggacaagagcaggtggcagcaggggaacgtcttctcatgctccgtgatgcatgaggctctgcacaaccactacacgcagaagagcctctccctgtctccgggtaaa

SEQ ID NO: 586 - protein, 523 aa, Artificial Sequence
  Synthetic polypeptide
MMYCGGNEVLCGPRVGSSGGSGGSGGLSGRSDNHGGGSEVQLVESGGGLVQPKGSLKLSCAASGFTFNTYAMNWVRQAPGKGLEWVARIRSKYNNYATYYADSVKDRFTISRDDSQSILYLQMNNLKTEDTAMYYCVRHGNFGNSYVSWFAYWGQGTLVTVSAGGGGSGGGGSGGGGSQAVVTQESALTTSPGETVTLTCRSSTGAVTTSNYANWVQEKPDHLFTGLIGGTNKRAPGVPARFSGSLIGDKAALTITGAQTEDEAIYFCALWYSNLWVFGGGTKLTVLGGSLDPKSSDKTHTCPPCPAPELLGGPSVFLFPPKPKDTLMISRTPEVTCVVVDVSHEDPEVKFNWYVDGVEVHNAKTKPREEQYNSTYRVVSVLTVLHQDWLNGKEYKCKVSNKALPAPIEKTISKAKGQPREPQVYTLPPSREEMTKNQVSLTCLVKGFYPSDIAVEWESNGQPENNYKTTPPVLDSDGSFFLYSKLTVDKSRWQQGNVFSCSVMHEALHNHYTQKSLSLSPGK

SEQ ID NO: 587 - protein, 249 aa, Artificial Sequence
  Synthetic polypeptide
EVQLVESGGGLVQPGGSLKLSCAASGFTFNKYAMNWVRQAPGKGLEWVARIRSKYNNYATYYADSVKDRFTISRDDSKNTAYLQMNNLKTEDTAVYYCVRHGNFGNSYISYWAYWGQGTLVTVSSGGGGSGGGGSGGGGSQTVVTQEPSLTVSPGGTVTLTCGSSTGAVTSGYYPNWVQQKPGQAPRGLIGGTKFLAPGTPARFSGSLLGGKAALTLSGVQPEDEAEYYCALWYSNRWVFGGGTKLTVL

SEQ ID NO: 588 - protein, 249 aa, Artificial Sequence
  Synthetic polypeptide
QTVVTQEPSLTVSPGGTVTLTCRSSTGAVTTSNYANWVQQKPGQAPRGLIGGTNKRAPGTPARFSGSLLGGKAALTLSGVQPEDEAEYYCALWYSNLWVFGGGTKLTVLGGGGSGGGGSGGGGSEVQLVESGGGLVQPGGSLKLSCAASGFTFNTYAMNWVRQAPGKGLEWVARIRSKYNNYATYYADSVKDRFTISRDDSKNTAYLQMNNLKTEDTAVYYCVRHGNFGNSYVSWFAYWGQGTLVTVSS

SEQ ID NO: 589 - protein, 96 aa, Artificial Sequence
  Synthetic polypeptide
QIVLTQSPAIMSASPGEKVTMTCSASSSVSYMNWYQQKSGTSPKRWIYDTSKLASGVPAHFRGSGSGTSYSLTISGMEAEDAATYYCQQWSSNPFT

SEQ ID NO: 590 - protein, 112 aa, Artificial Sequence
  Synthetic polypeptide
QVQLQQSGAELARPGASVKMSCKASGYTFTRYTMHWVKQRPGQGLEWIGYINPSRGYTNYNQKFKDKATLTTDKSSSTAYMQLSSLTSEDSAVYYCARYYDDHYCLDYWGQG

SEQ ID NO: 591 - protein, 119 aa, Artificial Sequence
  Synthetic polypeptide
QVQLVQSGGGVVQPGRSLRLSCKASGYTFTRYTMHWVRQAPGKGLEWIGYINPSRGYTNYNQKFKDRFTISTDKSKSTAFLQMDSLRPEDTAVYYCARYYDDHYCLDYWGQGTPVTVSS

SEQ ID NO: 592 - protein, 119 aa, Artificial Sequence
  Synthetic polypeptide
QVQLVESGGGVVQPGRSLRLSCSSSGYTFTRYTMHWVRQAPGKGLEWVAYINPSRGYTNYNQKFKDRFTISRDNSKNTLFLQMDSLRPEDTGVYFCARYYDDHYCLDYWGQGTPVTVSS

SEQ ID NO: 593 - protein, 96 aa, Artificial Sequence
  Synthetic polypeptide
DIQMTQSPSSLSASVGDRVTITCSASSSVSYMNWYQQTPGKAPKRWIYDTSKLASGVPSRFSGSGSGTDYTFTISSLQPEDIATYYCQQWSSNPFT

SEQ ID NO: 594 - protein, 107 aa, Artificial Sequence
  Synthetic polypeptide
QIVMTQSPSSLSASVGDRVTITCSASSSVSYMNWYQQTPGKAPKRWIYDTSKLASGVPSRFSGSGSGTDYTFTISSLQPEDIATYYCQQWSSNPFTFGQGTKLQITR

SEQ ID NO: 595 - protein, 107 aa, Artificial Sequence
  Synthetic polypeptide
DIQMTQSPSSLSASVGDRVTITCSASSSVSYMNWYQQTPGKAPKLLIYDTSKLASGVPSRFSGSGSGTDYTFTISSLQPEDIATYYCQQWSSNPFTFGQGTKLQITR

SEQ ID NO: 596 - protein, 119 aa, Artificial Sequence [sequence omitted]

SEQ ID NO: 597 - protein, 116 aa, Artificial Sequence
  Synthetic polypeptide
EVQLVESGGGLVQPGKSLKLSCEASGFTFSGYGMHWVRQAPGRGLESVAYITSSSINIKYADAVKGRFTVSRDNAKNLLFLQMNILKSEDTAMYYCARFDWDKNYWGQGTMVTVSS

SEQ ID NO: 598 - protein, 107 aa, Artificial Sequence
  Synthetic polypeptide
QIVLTQSPAIMSASPGEKVTMTCRASSSVSYMNWYQQKSGTSPKRWIYDTSKVASGVPYRFSGSGSGTSYSLTISSMEAEDAATYYCQQWSSNPLTFGSGTKLEINR

SEQ ID NO: 599 - protein, 107 aa, Artificial Sequence
  Synthetic polypeptide
QIVLTQSPAIMSASPGEKVTMTCSASSSVSYMNWYQQKSGTSPKRWIYDTSKLASGVPAHFRGSGSGTSYSLTISGMEAEDAATYYCQQWSSNPFTFGSGTKLEINR

SEQ ID NO: 600 - protein, 108 aa, Artificial Sequence
  Synthetic polypeptide
DIQMTQSPSSLPASLGDRVTINCQASQDISNYLNWYQQKPGKAPKLLIYYTNKLADGVPSRFSGSGSGRDSSFTISSLESEDIGSYYCQQYYNYPWTFGPGTKLEIKR

SEQ ID NO: 601 - protein, 139 aa, Artificial Sequence
  Synthetic polypeptide
MGWSWIFLFLLSGTAGVHSQVQLVQSGAEVKKPGASVKVSCKASGYTFISYTMHWVRQAPGQGLEWMGYINPRSGYTHYNQKLKDKATLTADKSASTAYMELSSLRSEDTAVYYCARSAYYDYDGFAYWGQGTLVTVSS

SEQ ID NO: 602 - protein, 126 aa, Artificial Sequence
  Synthetic polypeptide
METDTLLLWVLLLWVPGSTGDIQMTQSPSSLSASVGDRVTITCSASSSVSYMNWYQQKPGKAPKRLIYDTSKLASGVPSRFSGSGSGTDFTLTISSLQPEDFATYYCQQWSSNPPTFGGGTKVEIK

SEQ ID NO: 603 - protein, 122 aa, Artificial Sequence [sequence omitted]

SEQ ID NO: 604 - protein, 107 aa, Artificial Sequence [sequence omitted]

SEQ ID NO: 605 - protein, 469 aa, Artificial Sequence
  Synthetic polypeptide
MGWSCIILFLVATATGVHSEVQLVESGGGLVQPGGSLRLSCATSGYTFTEYTMHWMRQAPGKGLEWVAGINPKNGGTSHNQRFMDRFTISVDKSTSTAYMQMNSLRAEDTAVYYCARWRGLNYGFDVRYFDVWGQGTLVTVSSASTKGPSVFPLAPCSRSTSESTAALGCLVKDYFPEPVTVSWNSGALTSGVHTFPAVLQSSGLYSLSSVVTVTSSNFGTQTYTCNVDHKPSNTKVDKTVERKCCVECPPCPAPPVAGPSVFLFPPKPKDTLMISRTPEVTCVVVDVSHEDPEVQFNWYVDGMEVHNAKTKPREEQFNSTFRVVSVLTVVHQDWLNGKEYKCKVSNKGLPAPIEKTISKTKGQPREPQVYTLPPSREEMTKNQVSLTCLVKGFYPSDIAVEWESNGQPENNYKTTPPMLDSDGSFFLYSKLTVDKSRWQQGNVFSCSVMHEALHNHYTQKSLSLSPGK

SEQ ID NO: 606 - protein, 232 aa, Artificial Sequence
  Synthetic polypeptide
EVQLVESGGGLVQPGGSLRLSCATSGYTFTEYTMHWMRQAPGKGLEWVAGINPKNGGTSYADSVKGRFTISVDKSKNTLYLQMNSLRAEDTAVYYCARWRGLNYGFDVRYFDVWGQGTLVTVSSASTKGPSVFPLAPSSKSTSGGTAALGCLVKDYFPEPVTVSWNSGALTSGVHTFPAVLQSSGLYSLSSVVTVPSSSLGTQTYICNVNHKPSNTKVDKKVEPKSCDKTHT

SEQ ID NO: 607 - protein, 232 aa, Artificial Sequence
  Synthetic polypeptide
EVQLVESGGGLVQPGGSLRLSCATSGYTFTEYTMHWMRQAPGKGLEWVAGINPKNGGTSHNQRFMDRFTISVDKSKNTLYLQMNSLRAEDTAVYYCARWRGLNYGFDVRYFDVWGQGTLVTVSSASTKGPSVFPLAPSSKSTSGGTAALGCLVKDYFPEPVTVSWNSGALTSGVHTFPAVLQSSGLYSLSSVVTVPSSSLGTQTYICNVNHKPSNTKVDKKVEPKSCDKTHT

SEQ ID NO: 608 - protein, 232 aa, Artificial Sequence
  Synthetic polypeptide
EVQLVESGGGLVQPGGSLRLSCATSGYTFTEYTMHWMRQAPGKGLEWVAGINPKNGGTSHNQRFMDRFTLAVDKSKNTLYLQMNSLRAEDTAVYYCARWRGLNYGFDVRYFDVWGQGTLVTVSSASTKGPSVFPLAPSSKSTSGGTAALGCLVKDYFPEPVTVSWNSGALTSGVHTFPAVLQSSGLYSLSSVVTVPSSSLGTQTYICNVNHKPSNTKVDKKVEPKSCDKTHT

SEQ ID NO: 609 - protein, 232 aa, Artificial Sequence
  Synthetic polypeptide
EVQLVESGGGLVQPGGSLRLSCATSGYTFTEYTMHWMRQAPGKGLEWVAGINPKNGGTSHNQRFMDRFTISVDKSTSTAYMQMNSLRAEDTAVYYCARWRGLNYGFDVRYFDVWGQGTLVTVSSASTKGPSVFPLAPSSKSTSGGTAALGCLVKDYFPEPVTVSWNSGALTSGVHTFPAVLQSSGLYSLSSVVTVPSSSLGTQTYICNVNHKPSNTKVDKKVEPKSCDKTHT

SEQ ID NO: 610 - protein, 235 aa, Artificial Sequence
  Synthetic polypeptide
EVQLVESGGGLVQPGGSLRLSCATSGYTFTEYTMHWMRQAPGKGLEWVAGINPKNGGTSHNQRFMDRFTISVDKSTSTAYMQMNSLRAEDTAVYYCARWRGLNYGFDVRYFDVWGQGTLVTVSSASTKGPSVFPLAPSSKSTSGGTAALGCLVKDYFPEPVTVSWNSGALTSGVHTFPAVLQSSGLYSLSSVVTVPSSSLGTQTYICNVNHKPSNTKVDKKVEPKSCDKTHTCPP

SEQ ID NO: 611 - protein, 232 aa, Artificial Sequence
  Synthetic polypeptide
EVQLVESGGGLVQPGGSLRLSCATSGYTFTEYTMHWMRQAPGKGLEWVAGINPKNGGTSHNQRFMDRFTISVDKSKNTLYMELRSLRAEDTAVYYCARWRGLNYGFDVRYFDVWGQGTLVTVSSASTKGPSVFPLAPSSKSTSGGTAALGCLVKDYFPEPVTVSWNSGALTSGVHTFPAVLQSSGLYSLSSVVTVPSSSLGTQTYICNVNHKPSNTKVDKKVEPKSCDKTHT

SEQ ID NO: 612 - protein, 232 aa, Artificial Sequence
  Synthetic polypeptide
EVQLVESGGGLVQPGGSLRLSCATSGYTFTEYTMHWMRQAPGKGLEWVAGINPKNGGTSHNQRFMDRFTISVDKSKNTLYLQMNSLTSEDSGIYYCARWRGLNYGFDVRYFDVWGQGTLVTVSSASTKGPSVFPLAPSSKSTSGGTAALGCLVKDYFPEPVTVSWNSGALTSGVHTFPAVLQSSGLYSLSSVVTVPSSSLGTQTYICNVNHKPSNTKVDKKVEPKSCDKTHT

SEQ ID NO: 613 - protein, 232 aa, Artificial Sequence
  Synthetic polypeptide
EVQLVESGGGLVQPGGSLRLSCATSGYTFTEYTMHWMRQAPGKGLEWVAGINPKNGGTSHNQRFMDRFTISVDKSKNTLYLQMNSLRAEDTAVYYCARWRGLNYGFDVRYFDVWGAGTTVTVSSASTKGPSVFPLAPSSKSTSGGTAALGCLVKDYFPEPVTVSWNSGALTSGVHTFPAVLQSSGLYSLSSVVTVPSSSLGTQTYICNVNHKPSNTKVDKKVEPKSCDKTHT

SEQ ID NO: 614 - protein, 232 aa, Artificial Sequence
  Synthetic polypeptide
EVQLQQSGPELVQPGGSLRLSCATSGYTFTEYTMHWMRQAPGKGLEWVAGINPKNGGTSHNQRFMDRFTISVDKSKNTLYLQMNSLRAEDTAVYYCARWRGLNYGFDVRYFDVWGQGTLVTVSSASTKGPSVFPLAPSSKSTSGGTAALGCLVKDYFPEPVTVSWNSGALTSGVHTFPAVLQSSGLYSLSSVVTVPSSSLGTQTYICNVNHKPSNTKVDKKVEPKSCDKTHT

SEQ ID NO: 615 - protein, 232 aa, Artificial Sequence
  Synthetic polypeptide
EVQLVESGGGLVKPGASLRLSCATSGYTFTEYTMHWMRQAPGKGLEWVAGINPKNGGTSHNQRFMDRFTISVDKSKNTLYLQMNSLRAEDTAVYYCARWRGLNYGFDVRYFDVWGQGTLVTVSSASTKGPSVFPLAPSSKSTSGGTAALGCLVKDYFPEPVTVSWNSGALTSGVHTFPAVLQSSGLYSLSSVVTVPSSSLGTQTYICNVNHKPSNTKVDKKVEPKSCDKTHT

SEQ ID NO: 616 - protein, 232 aa, Artificial Sequence
  Synthetic polypeptide
EVQLVESGGGLVQPGGSLKISCKTSGYTFTEYTMHWMRQAPGKGLEWVAGINPKNGGTSHNQRFMDRFTISVDKSKNTLYLQMNSLRAEDTAVYYCARWRGLNYGFDVRYFDVWGQGTLVTVSSASTKGPSVFPLAPSSKSTSGGTAALGCLVKDYFPEPVTVSWNSGALTSGVHTFPAVLQSSGLYSLSSVVTVPSSSLGTQTYICNVNHKPSNTKVDKKVEPKSCDKTHT

SEQ ID NO: 617 - protein, 232 aa, Artificial Sequence
  Synthetic polypeptide
EVQLVESGGGLVQPGGSLRLSCATSGYTFTEYTMHWMKQSHGKSLEWVAGINPKNGGTSHNQRFMDRFTISVDKSKNTLYLQMNSLRAEDTAVYYCARWRGLNYGFDVRYFDVWGQGTLVTVSSASTKGPSVFPLAPSSKSTSGGTAALGCLVKDYFPEPVTVSWNSGALTSGVHTFPAVLQSSGLYSLSSVVTVPSSSLGTQTYICNVNHKPSNTKVDKKVEPKSCDKTHT

SEQ ID NO: 618 - protein, 232 aa, Artificial Sequence
  Synthetic polypeptide
EVQLVESGGGLVQPGGSLRLSCATSGYTFTEYTMHWMRQAPGKGLEWIGGFNPKNGGTSHNQRFMDRFTISVDKSKNTLYLQMNSLRAEDTAVYYCARWRGLNYGFDVRYFDVWGQGTLVTVSSASTKGPSVFPLAPSSKSTSGGTAALGCLVKDYFPEPVTVSWNSGALTSGVHTFPAVLQSSGLYSLSSVVTVPSSSLGTQTYICNVNHKPSNTKVDKKVEPKSCDKTHT

SEQ ID NO: 619 - protein, 233 aa, Artificial Sequence
  Synthetic polypeptide
MGWSCIILFLVATATGVHSDIQMTQSPSSLSASVGDRVTITCRASQDINNYLNWYQQKPGKAPKLLIYYTSTLHSGVPSRFSGSGSGTDYTLTISSLQPEDFATYYCQQGNTLPPTFGQGTKVEIKRTVAAPSVFIFPPSDEQLKSGTASVVCLLNNFYPREAKVQWKVDNALQSGNSQESVTEQDSKDSTYSLSSTLTLSKADYEKHKVYACEVTHQGLSSPVTKSFNRGEC

SEQ ID NO: 620 - protein, 214 aa, Artificial Sequence
  Synthetic polypeptide
DIQMTQSPSSLSASVGDRVTITCRASQDINNYLNWYQQKPGKAPKLLIYYTSTLESGVPSRFSGSGSGTDYTLTISSLQPEDFATYYCQQGNTLPPTFGQGTKVEIKRTVAAPSVFIFPPSDEQLKSGTASVVCLLNNFYPREAKVQWKVDNALQSGNSQESVTEQDSKDSTYSLSSTLTLSKADYEKHKVYACEVTHQGLSSPVTKSFNRGEC

SEQ ID NO: 621 - protein, 214 aa, Artificial Sequence
  Synthetic polypeptide
DIQMTQSPSSLSASVGDRVTITCRASQDINNYLNWYQQKPGKAPKLLIYYTSTLHSGVPSRFSGSGSGTDYTLTISSLQPEDFATYYCQQGNTLPPTFGQGTKVEIKRTVAAPSVFIFPPSDEQLKSGTASVVCLLNNFYPREAKVQWKVDNALQSGNSQESVTEQDSKDSTYSLSSTLTLSKADYEKHKVYACEVTHQGLSSPVTKSFNRGEC

SEQ ID NO: 622 - protein, 468 aa, Artificial Sequence
  Synthetic polypeptide
MERHWIFLLLLSVTAGVHSQVQLQQSGAELARPGASVKMSCKASGYTFTRYTMHWVKQRPGQGLEWIGYINPSRGYTNYNQKFKDKATLTTDKSSSTAYMQLSSLTSEDSAVYYCARYYDDHYCLDYWGQGTTLTVSSAKTTAPSVYPLAPVCGDTTGSSVTLGCLVKGYFPEPVTLTWNSGSLSSGVHTFPAVLQSDLYTLSSSVTVTSSTWPSQSITCNVAHPASSTKVDKKIEPRGPTIKPCPPCKCPAPNLLGGPSVFIFPPKIKDVLMISLSPIVTCVVVDVSEDDPDVQISWFVNNVEVHTAQTQTHREDYNSTLRVVSALPIQHQDWMSGKEFKCKVNNKDLPAPIERTISKPKGSVRAPQVYVLPPPEEEMTKKQVTLTCMVTDFMPEDIYVEWTNNGKTELNYKNTEPVLDSDGSYFMYSKLRVEKKNWVERNSYSCSVVHEGLHNHHTTKSFSRTPGK

SEQ ID NO: 623 - protein, 235 aa, Artificial Sequence
  Synthetic polypeptide
MDFQVQIFSFLLISASVIISRGQIVLTQSPAIMSASPGEKVTMTCSASSSVSYMNWYQQKSGTSPKRWIYDTSKLASGVPAHFRGSGSGTSYSLTISGMEAEDAATYYCQQWSSNPFTFGSGTKLEINRADTAPTVSIFPPSSEQLTSGGASVVCFLNNFYPKDINVKWKIDGSERQNGVLNSWTDQDSKDSTYSMSSTLTLTKDEYERHNSYTCEATHKTSTSPIVKSFNRNEC

SEQ ID NO: 624 - protein, 119 aa, Artificial Sequence [sequence omitted]

SEQ ID NO: 625 - protein, 130 aa, Artificial Sequence
  Synthetic polypeptide
DFMLTQPHSVSESPGKTVIISCTLSSGNIENNYVHWYQQRPGRAPTTVIFDDDKRPDGVPDRFSGSIDRSSNSASLTISGLQTEDEADYYCHSYVSSFNVFGGGTKLTVLGQPKAAPSVTLFPPSSEELQ

SEQ ID NO: 626 - protein, 449 aa, Artificial Sequence
  Synthetic polypeptide
EVQLLESGGGLVQPGGSLRLSCAASGFTFSSFPMAWVRQAPGKGLEWVSTISTSGGRTYYRDSVKGRFTISRDNSKNTLYLQMNSLRAEDTAVYYCAKFRQYSGGFDYWGQGTLVTVSSASTKGPSVFPLAPSSKSTSGGTAALGCLVKDYFPEPVTVSWNSGALTSGVHTFPAVLQSSGLYSLSSVVTVPSSSLGTQTYICNVNHKPSNTKVDKKVEPKSCDKTHTCPPCPAPELLGGPSVFLFPPKPKDTLMISRTPEVTCVVVDVSHEDPEVKFNWYVDGVEVHNAKTKPREEQYASTYRVVSVLTVLHQDWLNGKEYKCKVSNKALPAPIEKTISKAKGQPREPQVYTLPPSRDELTKNQVSLTCLVKGFYPSDIAVEWESNGQPENNYKTTPPVLDSDGSFFLYSKLTVDKSRWQQGNVFSCSVMHEALHNHYTQKSLSLSPGK

SEQ ID NO: 627 - protein, 111 aa, Artificial Sequence
  Synthetic polypeptide
QAVVTQANSVSTSLGSTVKLSCTLSSGNIENNYVHWYQLYEGRSPTTMIYDDDKRPDGVPDRFSGSIDRSSNSAFLTIHNVAIEDEAIYFCHSYVSSFNVFGGGTKLTVLR

SEQ ID NO: 628 - protein, 216 aa, Artificial Sequence
  Synthetic polypeptide
QAVVTQANSVSTSLGSTVKLSCTLSSGNIENNYVHWYQLYEGRSPTTMIYDDDKRPDGVPDRFSGSIDRSSNSAFLTIHNVAIEDEAIYFCHSYVSSFNVFGGGTKLTVLRQPKAAPSVTLFPPSSEELQANKATLVCLISDFYPGAVTVAWKADSSPVKAGVETTTPSKQSNNKYAASSYLSLTPEQWKSHRSYSCQVTHEGSTVEKTVAPTECS

SEQ ID NO: 629 - protein, 125 aa, Artificial Sequence
  Synthetic polypeptide
EVKLVESGGGLVQPGGSLRLSCAASGFTFNTYAMNWVRQAPGKGLEWVARIRSKYNNYATYYADSVKDRFTISRDDSKSSLYLQMNNLKTEDTAMYYCVRHGNFGNSYVSWFAYWGQGTLVTVSS

SEQ ID NO: 630 - protein, 125 aa, Artificial Sequence
  Synthetic polypeptide
EVKLVESGGGLVKPGRSLRLSCAASGFTFNTYAMNWVRQAPGKGLEWVARIRSKYNNYATYYADSVKDRFTISRDDSKSILYLQMNNLKTEDTAMYYCVRHGNFGNSYVSWFAYWGQGTLVTVSS

SEQ ID NO: 631 - protein, 125 aa, Artificial Sequence
  Synthetic polypeptide
EVKLVESGGGLVKPGRSLRLSCAASGFTFNTYAMNWVRQAPGKGLEWVARIRSKYNNYATYYADSVKDRFTISRDDSKSILYLQMNSLKTEDTAMYYCVRHGNFGNSYVSWFAYWGQGTLVTVSS

SEQ ID NO: 632 - protein, 125 aa, Artificial Sequence
  Synthetic polypeptide
EVKLVESGGGLVKPGRSLRLSCAASGFTFNTYAMNWVRQAPGKGLEWVARIRSKYNNYATYYADSVKDRFTISRDDSKSILYLQMNSLKTEDTAMYYCVRHGNFGNSYVSWFAYWGQGTMVTVSS

SEQ ID NO: 633-635 - skipped (3 entries)

SEQ ID NO: 636 - protein, 123 aa, Artificial Sequence
  Synthetic polypeptide
EVQLVESGGGLVQPGRSLRLSCAASGFTFDDYTMHWVRQAPGKGLEWVSGISWNSGSIGYADSVKGRFTISRDNAKKSLYLQMNSLRAEDTALYYCAKDNSGYGHYYYGMDVWGQGTTVTVAS

SEQ ID NO: 637 - protein, 123 aa, Artificial Sequence
  Synthetic polypeptide
EVQLVESGGGLVQPGGSLRLSCAATGFTFDDFTMHWVRQAPGKGLEWVSGISWNSGSIGYVDSVKGRFTISRDNAKNSLYLQMNSLRAEDTALYYCAKDNSGYGYYYYGMDVWGQGTTVTVSS

SEQ ID NO: 638 - protein, 118 aa, Artificial Sequence
  Synthetic polypeptide
QVQLVESGGGVVQPGRSLRLSCAASGFTFRSYAMHWVRQAPGKGLEWVAMVYYDGNNQYYADSVRGRFTISRDNSKNTLYLQMNSLRADDTAVYFCARGPGYNWLDPWGQGTLVTVSS

SEQ ID NO: 639 - protein, 118 aa, Artificial Sequence
  Synthetic polypeptide
QVQLVESGGGVVQPGRSLRLACVASGFTFRSYGMHWVRQAPGKGLQWVAMIYYDGKNKYYADSVRGRFTISRDNSKNTLYLQMNNLRVEDTAMYFCARGPGYNWLDPWGQGTLVTVSS

SEQ ID NO: 640 - protein, 119 aa, Artificial Sequence
  Synthetic polypeptide
DVQLVQSGAEVKKPGASVKVSCKASGYTFTRYTMHWVRQAPGQGLEWIGYINPSRGYTNYADSVKGRFTITTDKSTSTAYMELSSLRSEDTATYYCARYYDDHYCLDYWGQGTTVTVSS

SEQ ID NO: 641 - protein, 108 aa, Artificial Sequence
  Synthetic polypeptide
AEIVMTQSPATLSVSPGERATLSCRASQSVSSNLAWYQQKPGQAPRLLIYGASTRATGIPARFSGSGSGTEFTLTISSLQSEDFAVYYCQHYINWPLTFGGGTKVEIK

SEQ ID NO: 642 - protein, 107 aa, Artificial Sequence
  Synthetic polypeptide
EIVMTQSPATLSVSPGERATLSCRASHSVSRNSAWYQQKPGQAPRLLIYGASTRATGIPARFSGSGSGTEFTLTISSLQSEDFAIYYCQQYNNWPLTFGGGTKVEIK

SEQ ID NO: 643 - protein, 107 aa, Artificial Sequence
  Synthetic polypeptide
EIVMTQSPATLSVSPGERATLSCRASQSVSSNLAWYQQKPGQAPRLLIYGASTRATGIPARFSGSGSGTEFTLTISSLQSEDFAVYYCQHYINWPLTFGGGTKVEIK

SEQ ID NO: 644 - protein, 107 aa, Artificial Sequence
  Synthetic polypeptide
EIVMTQSPATLSVSPGERATLSCRASQSVSRNLAWYQQKPGQAPRLLIYGASTRATGIPARFSGSGSGTDFTLTISSLQSEDFAVYYCQQYNNWPLTFGGGTKVVIK

SEQ ID NO: 645 - protein, 107 aa, Artificial Sequence
  Synthetic polypeptide
EIVMTQSPATLSVSPGERATLSCRASQRISSNLAWYQQKPGQAPRLLIYGASTRATGSPARFSGSGSGTDFTLTISSLQSEDVAVYYCQQHHNWPLTFGGGTKVEIK

SEQ ID NO: 646 - protein, 106 aa, Artificial Sequence
  Synthetic polypeptide
DIVLTQSPATLSLSPGERATLSCRASQSVSYMNWYQQKPGKAPKRWIYDTSKVASGVPARFSGSGSGTDYSLTINSLEAEDAATYYCQQWSSNPLTFGGGTKVEIK

SEQ ID NO: 647 - protein, 119 aa, Artificial Sequence
  Synthetic polypeptide
QVQLVQSGAEVKKPGASVKVSCKASGYTFTRYTMHWVRQAPGQGLEWMGYINPSRGYTNYNQKFKDRVTMTTDTSISTAYMELSRLRSDDTAVYYCARYYDDHYCLDYWGQGTLVTVSS

SEQ ID NO: 648 - protein, 119 aa, Artificial Sequence
  Synthetic polypeptide
QVQLVQSGAEVKKPGASVKVSCKASGYTFTRYTMHWVRQAPGQGLEWMGYINPSRGYTNYNQKFKDRVTMTTDTSISTAYMELSRLRSDDTAVYYCARYYDDHYSLDYWGQGTLVTVSS

SEQ ID NO: 649 - protein, 106 aa, Artificial Sequence
  Synthetic polypeptide
EIVLTQSPATLSLSPGERATLSCSASSSVSYMNWYQQKPGQAPRLLIYDTSKLASGVPAHFRGSGSGTDYTLTISSLEPEDFAVYYCQQWSSNPFTFGQGTKVEIK

SEQ ID NO: 650 - protein, 106 aa, Artificial Sequence [sequence omitted]

SEQ ID NO: 651 - protein, 119 aa, Artificial Sequence
  Synthetic polypeptide
QVQLVQSGSELKKPGASVKMSCKASGYTFTRYTMHWVRQAPGKGLEWIGYINPSRGYTNYNQKFKDRATLTTDKSTSTAYMQLSSLRSEDTAVYYCARYYDDHYSLDYWGQGTLVTVSS

SEQ ID NO: 652 - protein, 106 aa, Artificial Sequence
  Synthetic polypeptide
QIVLTQSPATLSLSPGERATMSCSASSSVSYMNWYQQKPGKAPKRWIYDTSKLASGVPSRFRGSGSGTDYTLTISSLQPEDFATYYCQQWSSNPFTFGGGTKVEIK

SEQ ID NO: 653 - protein, 125 aa, Artificial Sequence
  Synthetic polypeptide
EVQLVESGGGLVQPGGSLRLSCAASGFTFSTYAMNWVRQAPGKGLEWVGRIRSKYNNYATYYADSVKDRFTISRDDSKNSLYLQMNSLKTEDTAVYYCARHGNFGNSYVSWFAYWGQGTLVTVSS

SEQ ID NO: 654 - protein, 125 aa, Artificial Sequence
  Synthetic polypeptide
EVQLVESGGGLVQPGGSLRLSCAASGFTFNTYAMNWVRQAPGKGLEWVGRIRSKYNNYATYYADSVKDRFTISRDDSKNSLYLQMNSLKTEDTAVYYCARHGNFGNSYVSWFAYWGQGTLVTVSS

SEQ ID NO: 655 - protein, 125 aa, Artificial Sequence
  Synthetic polypeptide
EVQLVESGGGLVQPGGSLRLSCAASGFTFSTYAMNWVRQAPGKGLEWVARIRSKYNNYATYYADSVKDRFTISRDDSKNSLYLQMNSLKTEDTAVYYCARHGNFGNSYVSWFAYWGQGTLVTVSS

SEQ ID NO: 656 - protein, 125 aa, Artificial Sequence
  Synthetic polypeptide
EVQLVESGGGLVQPGGSLRLSCAASGFTFSTYAMNWVRQAPGKGLEWVGRIRSKYNNYATYYADSVKDRFTISRDDSKNSLYLQMNSLKTEDTAVYYCVRHGNFGNSYVSWFAYWGQGTLVTVSS

SEQ ID NO: 657 - protein, 125 aa, Artificial Sequence
  Synthetic polypeptide
EVQLVESGGGLVQPGGSLRLSCAASGFTFNTYAMNWVRQAPGKGLEWVARIRSKYNNYATYYADSVKDRFTISRDDSKNSLYLQMNSLKTEDTAVYYCARHGNFGNSYVSWFAYWGQGTLVTVSS

SEQ ID NO: 658 - protein, 125 aa, Artificial Sequence
  Synthetic polypeptide
EVQLVESGGGLVQPGGSLRLSCAASGFTFNTYAMNWVRQAPGKGLEWVGRIRSKYNNYATYYADSVKDRFTISRDDSKNSLYLQMNSLKTEDTAVYYCVRHGNFGNSYVSWFAYWGQGTLVTVSS

SEQ ID NO: 659 - protein, 125 aa, Artificial Sequence
  Synthetic polypeptide
EVQLVESGGGLVQPGGSLRLSCAASGFTFNTYAMNWVRQAPGKGLEWVGRIRNKYNNYATEYADSVKDRFTISRDDSKNSLYLQMNSLKTEDTAVYYCVRHGNFGNSYVSWFAYWGQGTLVTVSS

SEQ ID NO: 660 - protein, 125 aa, Artificial Sequence
  Synthetic polypeptide
EVQLVESGGGLVQPGGSLRLSCAASGFTFSTYAMNWVRQAPGKGLEWVARIRSKYNNYATYYADSVKDRFTISRDDSKNSLYLQMNSLKTEDTAVYYCVRHGNFGNSYVSWFAYWGQGTLVTVSS

SEQ ID NO: 661 - protein, 125 aa, Artificial Sequence
  Synthetic polypeptide
EVQLVESGGGLVQPGGSLRLSCAASGFTFNTYAMNWVRQAPGKGLEWVARIRSKYNNYATYYADSVKDRFTISRDDSKNSLYLQMNSLKTEDTAVYYCVRHGNFGNSYVSWFAYWGQGTLVTVSS

SEQ ID NO: 662 - protein, 125 aa, Artificial Sequence
  Synthetic polypeptide
EVQLVESGGGLVQPGGSLRLSCAASGFTFNTYAMNWVRQAPGKGLEWVARIRNKYNNYATEYADSVKDRFTISRDDSKNSLYLQMNSLKTEDTAVYYCVRHGNFGNSYVSWFAYWGQGTLVTVSS

SEQ ID NO: 663 - protein, 125 aa, Artificial Sequence
  Synthetic polypeptide
EVQLVESGGGLVQPGGSLRLSCAASGFTFNTYAMNWVRQAPGKGLEWVARTRSKANSYTTYYAASVKGRFTISRDDSKNSLYLQMNSLKTEDTAVYYCARHGNFGNSYVSWFAYWGQGTLVTVSS

SEQ ID NO: 664 - protein, 125 aa, Artificial Sequence
  Synthetic polypeptide
EVQLVESGGGLVQPGGSLRLSCAASGFTFNTYAMNWVRQAPGKGLEWVGRTRSKANSYTTYYAASVKGRFTISRDDSKNSLYLQMNSLKTEDTAVYYCARHGNFGNSYVSWFAYWGQGTLVTVSS

SEQ ID NO: 665 - protein, 125 aa, Artificial Sequence
  Synthetic polypeptide
EVQLVESGGGLVQPGGSLRLSCAASGFTFNTYAMNWVRQAPGKGLEWVGRIRSKYNNYATEYAASVKDRFTISRDDSKNSLYLQMNSLKTEDTAVYYCVRHGNFGNSYVSWFAYWGQGTLVTVSS

SEQ ID NO: 666 - protein, 125 aa, Artificial Sequence
  Synthetic polypeptide
EVQLVESGGGLVQPGGSLRLSCAASGFTFNTYAMNWVRQAPGKGLEWVARIRNKYNNYATEYAASVKDRFTISRDDSKNSLYLQMNSLKTEDTAVYYCVRHGNFGNSYVSWFAYWGQGTLVTVSS

SEQ ID NO: 667 - protein, 125 aa, Artificial Sequence; identical to SEQ ID NO: 664
  Synthetic polypeptide

SEQ ID NO: 668 - protein, 125 aa, Artificial Sequence; identical to SEQ ID NO: 663
  Synthetic polypeptide

SEQ ID NO: 669 - protein, 121 aa, Artificial Sequence
  Synthetic polypeptide
QVQLVQSGAEVKKPGASVKVSCKASGYTFTRSTMHWVRQAPGQGLEWIGYINPSSAYTNYNQKFKDRVTITADKSTSTAYMELSSLRSEDTAVYYCASPQVHYDYNGFPYWGQGTLVTVSS

SEQ ID NO: 670 - protein, 110 aa, Artificial Sequence
  Synthetic polypeptide
QAVVTQEPSLTVSPGGTVTLTCRSSTGAVTTSNYANWFQQKPGQAPRTLIGGTNKRAPWTPARFSGSLLGGKAALTITGAQAEDEADYYCALWYSNLWVFGGGTKLTVLG

SEQ ID NO: 671 - protein, 110 aa, Artificial Sequence
  Synthetic polypeptide
QAVVTQEPSLTVSPGGTVTLTCRSSTGAVTTSNYANWVQQKPGQAPRTLIGGTNKRAPWTPARFSGSLLGGKAALTITGAQAEDEADYYCALWYSNLWVFGGGTKLTVLG

SEQ ID NO: 672 - protein, 110 aa, Artificial Sequence
  Synthetic polypeptide
QAVVTQEPSLTVSPGGTVTLTCRSSTGAVTTSNYANWFQEKPGQAPRTLIGGTNKRAPWTPARFSGSLLGGKAALTITGAQAEDEADYYCALWYSNLWVFGGGTKLTVLG

SEQ ID NO: 673 - protein, 110 aa, Artificial Sequence
  Synthetic polypeptide
QAVVTQEPSLTVSPGGTVTLTCRSSTGAVTTSNYANWFQQKPGQAPRGLIGGTNKRAPWTPARFSGSLLGGKAALTITGAQAEDEADYYCALWYSNLWVFGGGTKLTVLG

SEQ ID NO: 674 - protein, 110 aa, Artificial Sequence
  Synthetic polypeptide
QAVVTQEPSLTVSPGGTVTLTCRSSTGAVTTSNYANWVQEKPGQAPRTLIGGTNKRAPWTPARFSGSLLGGKAALTITGAQAEDEADYYCALWYSNLWVFGGGTKLTVLG

SEQ ID NO: 675 - protein, 110 aa, Artificial Sequence
  Synthetic polypeptide
QAVVTQEPSLTVSPGGTVTLTCRSSTGAVTTSNYANWVQQKPGQAPRGLIGGTNKRAPWTPARFSGSLLGGKAALTITGAQAEDEADYYCALWYSNLWVFGGGTKLTVLG

SEQ ID NO: 676 - protein, 110 aa, Artificial Sequence
  Synthetic polypeptide
QAVVTQEPSLTVSPGGTVTLTCRSSTGAVTTSNYANWFQEKPGQAPRGLIGGTNKRAPWTPARFSGSLLGGKAALTITGAQAEDEADYYCALWYSNLWVFGGGTKLTVLG

SEQ ID NO: 677 - protein, 110 aa, Artificial Sequence
  Synthetic polypeptide
QAVVTQEPSLTVSPGGTVTLTCRSSTGAVTTSNYANWVQEKPGQAPRGLIGGTNKRAPWTPARFSGSLLGGKAALTITGAQAEDEADYYCALWYSNLWVFGGGTKLTVLG

SEQ ID NO: 678 - protein, 110 aa, Artificial Sequence
  Synthetic polypeptide
QAVVTQEPSLTVSPGGTVTLTCRSSTGAVTTSNYANWVQEKPGQAFRGLIGGTNKRAPWTPARFSGSLLGGKAALTITGAQAEDEADYYCALWYSNLWVFGGGTKLTVLG

SEQ ID NO: 679 - protein, 106 aa, Artificial Sequence
  Synthetic polypeptide
DIQMTQSPSSLSASVGDRVTITCSASSSVSYMNWYQQKPGKAPKRLIYDSSKLASGVPSRFSGSGSGTEFTLTISSLQPEDFATYYCQQWSRNPPTFGGGTKVEIK

SEQ ID NO: 680 - protein, 106 aa, Artificial Sequence
  Synthetic polypeptide
DVVMTQSPAIMSAFPGEKVTITCSASSSVSYMNWYQQKPGKAPKRWIYDSSKLASGVPSRFSGSGSGTEFTLTISSLQPEDFATYYCQQWSRNPPTFGGGTKVEIK

SEQ ID NO: 681 - protein, 121 aa, Artificial Sequence
  Synthetic polypeptide
QVQLVQSGAEVKKPGASVKVSCKASGYTFTRSTMHWVKQAPGQGLEWIGYINPSSAYTNYNQKFKDKATLTADKSSSTAYMQLSSLRSEDTAVYYCARPQVHYDYNGFPYWGQGTLVTVSS

SEQ ID NO: 682 - protein, 121 aa, Artificial Sequence
  Synthetic polypeptide
QVQLVQSGGGVVQPGRSLRLSCKASGYTFTRSTMHWVRQAPGKGLEWIGYINPSSAYTNYNQKFKDKATLTADKSKNTAYMELSSLRSEDTAVYYCARPQVHYDYNGFPYWGQGTLVTVSS

SEQ ID NO: 683 - protein, 121 aa, Artificial Sequence
  Synthetic polypeptide
QVQLVQSGGGVVQPGRSLRLSCKASGYTFTRSTMHWVRQAPGKGLEWIGYINPSSAYTNYNQKFKDRFTISADKSKSTAFLQMDSLRPEDTGVYFCARPQVHYDYNGFPYWGQGTPVTVSS

SEQ ID NO: 684 - protein, 121 aa, Artificial Sequence
  Synthetic polypeptide
QVQLVESGGGVVQPGRSLRLSCKASGYTFTRSTMHWVRQAPGQGLEWIGYINPSSAYTNYNQKFKDRFTISADKSKSTAFLQMDSLRPEDTGVYFCARPQVHYDYNGFPYWGQGTPVTVSS

SEQ ID NO: 685 - protein, 121 aa, Artificial Sequence
  Synthetic polypeptide
QVQLVQSGAEVKKPGASVKVSCKASGYTFTRSTMHWVRQAPGQRLEWMGYINPSSAYTNYNQKFKDRVTITRDTSASTAYMELSSLRSEDTAVYYCARPQVHYDYNGFPYWGQGTLVTVSS

SEQ ID NO: 686 - protein, 121 aa, Artificial Sequence
  Synthetic polypeptide
EVQLVESGGGLVKPGGSLRLSCAASGFTFSRSTMHWVRQAPGKGLEWVSYINPSSAYTNYNQKFKDRFTISRDNAKNSLYLQMNSLRAEDTAVYYCARPQVHYDYNGFPYWGQGTLVTVSS

SEQ ID NO: 687 - protein, 108 aa, Artificial Sequence
  Synthetic polypeptide
AQDIQMTQSPSSLSASVGDRVTMTCSASSSVSYMNWYQQKPGKAPKLLIYDSSKLASGVPARFSGSGSGTDYTLTISSLQPEDFATYYCQQWSRNPPTFGGGTKVEIK

SEQ ID NO: 688 - protein, 106 aa, Artificial Sequence
  Synthetic polypeptide
EIVLTQSPATLSLSPGERATLSCSASSSVSYMNWYQQKPGQAPRLLIYDSSKLASGIPARFSGSGSGTDFTLTISSLEPEDFAVYYCQQWSRNPPTFGGGTKVEIK

SEQ ID NO: 689 - protein, 108 aa, Artificial Sequence
  Synthetic polypeptide
AQDIQMTQSPSSLSASVGDRVTMTCSASSSVSYMNWYQQKPGKAPKRWIYDSSKLASGVPARFSGSGSGTDYTLTISSLQPEDFATYYCQQWSRNPPTFGGGTKLQIT

SEQ ID NO: 690 - protein, 108 aa, Artificial Sequence
  Synthetic polypeptide
AQDIQMTQSPSSLSASVGDRVTITCSASSSVSYMNWYQQTPGKAPKRWIYDSSKLASGVPSRFSGSGSGTDFTLTISSLQPEDIATYYCQQWSRNPPTFGQGTKLQIT

SEQ ID NO: 691 - protein, 118 aa, Artificial Sequence [sequence omitted]

SEQ ID NO: 692 - protein, 118 aa, Artificial Sequence
  Synthetic polypeptide
QVQLVQSGGGVVQSGRSLRLSCAASGFKFSGYGMHWVRQAPGKGLEWVAVIWYDGSKKYYVDSVKGRFTISRDNSKNTLYLQMNSLRGEDTAVYYCARQMGYWHFDLWGRGTLVTVSS

SEQ ID NO: 693 - protein, 118 aa, Artificial Sequence
  Synthetic polypeptide
QVQLVESGGGVVQPGRSLRLSCAASGFTFRSYGMHWVRQAPGKGLEWVAIIWYDGSKKNYADSVKGRFTISRDNSKNTLYLQMNSLRAEDTAVYYCARGTGYNWFDPWGQGTLVTVSS

SEQ ID NO: 694 - protein, 118 aa, Artificial Sequence
  Synthetic polypeptide
QVQLVQSGGGVVQPGRSLRLSCVASGFTFSSYGMHWVRQAPGKGLEWVAAIWYNGRKQDYADSVKGRFTISRDNSKNTLYLQMNSLRAEDTAVYYCTRGTGYNWFDPWGQGTLVTVSS

SEQ ID NO: 695 - protein, 108 aa, Artificial Sequence [sequence omitted]

SEQ ID NO: 696 - protein, 108 aa, Artificial Sequence
  Synthetic polypeptide
EIVLTQSPRTLSLSPGERATLSCRASQSVSSSYLAWYQQKPGQAPRLLIYGASSRATGIPDRFSGSGSGTDFTLTISRLDPEDFAVYYCQQYGSSPITFGQGTRLEIK

SEQ ID NO: 697 - protein, 106 aa, Artificial Sequence
  Synthetic polypeptide
DILMTQSPSSLSASVGDRVTITCRASQGISSALAWYQQKPGKAPKLLIYYASSLQSGVPSRFSGSGSGTDYTLTISSLQPEDFATYYCQQYYSTLTFGGGTKVEIK

SEQ ID NO: 698 - protein, 106 aa, Artificial Sequence
  Synthetic polypeptide
DIVMTQSPSSLSASVGDRVTITCRASQGISSALAWYQQKPGKAPKLLIYDASSLGSGVPSRFSGSGSGTDFTLTISSLQPEDFATYYCQQYYSTLTFGGGTKVEIK

SEQ ID NO: 699 - protein, 106 aa, Artificial Sequence
  Synthetic polypeptide
DIQMTQSPFSLSASVGDRVTITCWASQGISSYLAWYQQKPAKAPKLFIYYASSLQSGVPSRFSGSGSGTDYTLTISSLQPEDFATYYCQQYYSTLTFGGGTKVEIK

SEQ ID NO: 700 - protein, 106 aa, Artificial Sequence
  Synthetic polypeptide
DIEMTQSPFSLSASVGDRVTITCWASQGISSYLAWYQQKPAKAPKLFIYYASSLQSGVPSRFSGSGSGTDYTLTISSLQPEDFATYYCQQYYSTLTFGGGTKVEIK

SEQ ID NO: 701 - protein, 107 aa, Artificial Sequence
  Synthetic polypeptide
EIVLTQSPATLSLSPGERATLSCRASQSVSSYLAWYQQKPGQAPRLLIYDASNRATGIPARFSGSGSGTDFTLTISSLEPEDFAVYYCQQRSNWPWTFGQGTKVEIK

SEQ ID NO: 702 - protein, 107 aa, Artificial Sequence
  Synthetic polypeptide
AIQLTQSPSSLSASVGDRVTITCRASQGISSALAWYQQKPGKAPKLLIYDASSLESGVPSRFSGSGSGTDFTLTISSLQPEDFATYYCQQFNSYPITFGQGTRLEIK

SEQ ID NO: 703 - protein, 120 aa, Artificial Sequence [sequence omitted]

SEQ ID NO: 704 - protein, 106 aa, Artificial Sequence [sequence omitted]

SEQ ID NO: 705 - protein, 125 aa, Artificial Sequence
  Synthetic polypeptide
EVQLVESGGGLVQPGGSLRLSCAASGFTFNTYAMNWVRQAPGKGLEWVGRIRSKYNNYATYYADSVKGRFTISRDDSKNTLYLQMNSLRAEDTAVYYCVRHGNFGNSYVSWFAYWGQGTLVTVSS

SEQ ID NO: 706 - protein, 125 aa, Artificial Sequence
  Synthetic polypeptide
EVQLVESGGGDVQPGGSLRLSCAASGFTFNTYAMNWVRQAPGKGLEWVGRIRSKYNNYATYYADSVKGRFTISRDDSKNTLYLQMNSLRAEDTAVYYCVRHGNFGNSYVSWFAYWGQGTLVTVSS

SEQ ID NO: 707 - protein, 125 aa, Artificial Sequence
  Synthetic polypeptide
EVQLVESGGGKVQPGGSLRLSCAASGFTFNTYAMNWVRQAPGKGLEWVGRIRSKYNNYATYYADSVKGRFTISRDDSKNTLYLQMNSLRAEDTAVYYCVRHGNFGNSYVSWFAYWGQGTLVTVSS

SEQ ID NO: 708 - protein, 125 aa, Artificial Sequence
  Synthetic polypeptide
EVQLVESGGGNVQPGGSLRLSCAASGFTFNTYAMNWVRQAPGKGLEWVGRIRSKYNNYATYYADSVKGRFTISRDDSKNTLYLQMNSLRAEDTAVYYCVRHGNFGNSYVSWFAYWGQGTLVTVSS

SEQ ID NO: 709 - protein, 125 aa, Artificial Sequence
  v
EVQLVESGGGSVQPGGSLRLSCAASGFTFNTYAMNWVRQAPGKGLEWVGRIRSKYNNYATYYADSVKGRFTISRDDSKNTLYLQMNSLRAEDTAVYYCVRHGNFGNSYVSWFAYWGQGTLVTVSS

SEQ ID NO: 710 - protein, 125 aa, Artificial Sequence
  Synthetic polypeptide
EVQLVESGGGLVQPGGSLKLSCAASGFTFNTYAMNWVRQAPGKGLEWVGRIRSKYNNYATYYADSVKGRFTISRDDSKNTLYLQMNSLRAEDTAVYYCVRHGNFGNSYVSWFAYWGQGTLVTVSS

SEQ ID NO: 711 - protein, 125 aa, Artificial Sequence
  Synthetic polypeptide
EVQLVESGGGLVQPGGSLRLSCAASGFTFSTYAMNWVRQAPGKGLEWVGRIRSKYNNYATYYADSVKGRFTISRDDSKNTLYLQMNSLRAEDTAVYYCVRHGNFGNSYVSWFAYWGQGTLVTVSS

SEQ ID NO: 712 - protein, 125 aa, Artificial Sequence
  Synthetic polypeptide
EVQLVESGGGLVQPGGSLRLSCAASGFTFNTYAMHWVRQAPGKGLEWVGRIRSKYNNYATYYADSVKGRFTISRDDSKNTLYLQMNSLRAEDTAVYYCVRHGNFGNSYVSWFAYWGQGTLVTVSS

SEQ ID NO: 713 - protein, 125 aa, Artificial Sequence
  Synthetic polypeptide
EVQLVESGGGLVQPGGSLRLSCAASGFTFNTYAMSWVRQAPGKGLEWVGRIRSKYNNYATYYADSVKGRFTISRDDSKNTLYLQMNSLRAEDTAVYYCVRHGNFGNSYVSWFAYWGQGTLVTVSS

SEQ ID NO: 714 - protein, 125 aa, Artificial Sequence
  Synthetic polypeptide
EVQLVESGGGLVQPGGSLRLSCAASGFTFNTYAMNWVRQASGKGLEWVGRIRSKYNNYATYYADSVKGRFTISRDDSKNTLYLQMNSLRAEDTAVYYCVRHGNFGNSYVSWFAYWGQGTLVTVSS

SEQ ID NO: 715 - protein, 125 aa, Artificial Sequence
  Synthetic polypeptide
EVQLVESGGGLVQPGGSLRLSCAASGFTFNTYAMNWVRQAPGKGLEWVGRIRSKANNYATYYADSVKGRFTISRDDSKNTLYLQMNSLRAEDTAVYYCVRHGNFGNSYVSWFAYWGQGTLVTVSS

SEQ ID NO: 716 - protein, 125 aa, Artificial Sequence
  Synthetic polypeptide
EVQLVESGGGLVQPGGSLRLSCAASGFTFNTYAMNWVRQAPGKGLEWVGRIRSKANSYATYYADSVKGRFTISRDDSKNTLYLQMNSLRAEDTAVYYCVRHGNFGNSYVSWFAYWGQGTLVTVSS

SEQ ID NO: 717 - protein, 125 aa, Artificial Sequence
  Synthetic polypeptide
EVQLVESGGGLVQPGGSLRLSCAASGFTFNTYAMNWVRQAPGKGLEWVGRIRSKYNNYATAYADSVKGRFTISRDDSKNTLYLQMNSLRAEDTAVYYCVRHGNFGNSYVSWFAYWGQGTLVTVSS

SEQ ID NO: 718 - protein, 125 aa, Artificial Sequence
  Synthetic polypeptide
EVQLVESGGGLVQPGGSLRLSCAASGFTFNTYAMNWVRQAPGKGLEWVGRIRSKYNNYATYYAASVKGRFTISRDDSKNTLYLQMNSLRAEDTAVYYCVRHGNFGNSYVSWFAYWGQGTLVTVSS

SEQ ID NO: 719 - protein, 125 aa, Artificial Sequence
  Synthetic polypeptide
EVQLVESGGGLVQPGGSLRLSCAASGFTFNTYAMNWVRQAPGKGLEWVGRIRSKYNNYATYYADSVKGRFTISRDNSKNTLYLQMNSLRAEDTAVYYCVRHGNFGNSYVSWFAYWGQGTLVTVSS

SEQ ID NO: 720 - protein, 123 aa, Artificial Sequence
  Synthetic polypeptide
EVQLVESGGGLVQPGGSLRLSCAASGFTFNTYAMNWVRQAPGKGLEWVGRIRSKYNNYATYYADSVKGRFTISRDTSKNTLYLQMNSLRAEDTAVYYCVRHGNFGNSYVSWFAYWGQGTLVTV

SEQ ID NO: 721 - protein, 125 aa, Artificial Sequence
  Synthetic polypeptide
EVQLVESGGGLVQPGGSLRLSCAASGFTFNTYAMNWVRQAPGKGLEWVGRIRSKYNNYATYYADSVKGRFTISRDDSKNTAYLQMNSLRAEDTAVYYCVRHGNFGNSYVSWFAYWGQGTLVTVSS

SEQ ID NO: 722 - protein, 125 aa, Artificial Sequence
  Synthetic polypeptide
EVQLVESGGGLVQPGGSLRLSCAASGFTFNTYAMNWVRQAPGKGLEWVGRIRSKYNNYATYYADSVKGRFTISRDDSKNTLYLQMNSLRDEDTAVYYCVRHGNFGNSYVSWFAYWGQGTLVTVSS

SEQ ID NO: 723 - protein, 125 aa, Artificial Sequence
  Synthetic polypeptide
EVQLVESGGGLVQPGGSLRLSCAASGFTFNTYAMNWVRQAPGKGLEWVGRIRSKYNNYATYYADSVKGRFTISRDDSKNTLYLQMNSLRKEDTAVYYCVRHGNFGNSYVSWFAYWGQGTLVTVSS

SEQ ID NO: 724 - protein, 125 aa, Artificial Sequence
  Synthetic polypeptide
EVQLVESGGGLVQPGGSLRLSCAASGFTFNTYAMNWVRQAPGKGLEWVGRIRSKYNNYATYYADSVKGRFTISRDDSKNTLYLQMNSLRSEDTAVYYCVRHGNFGNSYVSWFAYWGQGTLVTVSS

SEQ ID NO: 725 - protein, 125 aa, Artificial Sequence
  Synthetic polypeptide
EVQLVESGGGLVQPGGSLRLSCAASGFTFNTYAMNWVRQAPGKGLEWVGRIRSKYNNYATYYADSVKGRFTISRDDSKNTLYLQMNSLRAEDTAVYYCARHGNFGNSYVSWFAYWGQGTLVTVSS

SEQ ID NO: 726 - protein, 125 aa, Artificial Sequence
  Synthetic polypeptide
EVQLVESGGGLVQPGGSLRLSCAASGFTFNTYAMNWVRQAPGKGLEWVGRIRSKYNNYATYYADSVKGRFTISRDDSKNTLYLQMNSLRAEDTAVYYCTRHGNFGNSYVSWFAYWGQGTLVTVSS

SEQ ID NO: 727 - protein, 125 aa, Artificial Sequence
  Synthetic polypeptide
EVQLVESGGGLVQPGGSLRLSCAASGFTFNTYAMNWVRQAPGKGLEWVGRIRSKYNNYATYYADSVKGRFTISRDDSKNTLYLQMNSLRAEDTAVYYCVRHGNFGDSYVSWFAYWGQGTLVTVSS

SEQ ID NO: 728 - protein, 125 aa, Artificial Sequence
  Synthetic polypeptide
EVQLVESGGGLVQPGGSLRLSCAASGFTFNTYAMNWVRQAPGKGLEWVGRIRSKYNNYATYYADSVKGRFTISRDDSKNTLYLQMNSLRAEDTAVYYCVRHGNFGQSYVSWFAYWGQGTLVTVSS

SEQ ID NO: 729 - protein, 125 aa, Artificial Sequence
  Synthetic polypeptide
EVQLVESGGGLVQPGGSLRLSCAASGFTFNTYAMNWVRQAPGKGLEWVGRIRSKYNNYATYYADSVKGRFTISRDDSKNTLYLQMNSLRAEDTAVYYCVRHGNFGNTYVSWFAYWGQGTLVTVSS

SEQ ID NO: 730 - protein, 125 aa, Artificial Sequence
  Synthetic polypeptide
EVQLVESGGGLVQPGGSLRLSCAASGFTFNTYAMNWVRQAPGKGLEWVGRIRSKYNNYATYYADSVKGRFTISRDDSKNTLYLQMNSLRAEDTAVYYCVRHGNFGNSYVSWFDYWGQGTLVTVSS

SEQ ID NO: 731 - protein, 125 aa, Artificial Sequence
  Synthetic polypeptide
EVQLVESGGGLVQPGGSLRLSCAASGFTFNTYAMNWVRQAPGKGLEWVGRIRSKYNNYATYYADSVKGRFTISRDDSKNTLYLQMNSLRAEDTAVYYCVRHGNFGNSYVSWFAYWGQGTTVTVSS

SEQ ID NO: 732 - protein, 125 aa, Artificial Sequence
  Synthetic polypeptide
EVQLVESGGGLVQPGGSLRLSCAASGFTFNTYAMNWVRQAPGKSLEWVGRIRSKYNNYATYYADSVKGRFTISRDDSKNTLYLQMNSLRAEDTAVYYCVRHGNFGNSYVSWFAYWGQGTLVTVSS

SEQ ID NO: 733 - protein, 125 aa, Artificial Sequence
  Synthetic polypeptide
EVQLVESGGGLVQPGGSLRLSCAASGFTFNTYAMNWVRQAPGKGLEWVGRIRSKYNNYATYYADSVKGRFTISRDDSKNTLYLQMNSLRAEDTATYYCVRHGNFGNSYVSWFAYWGQGTLVTVSS

SEQ ID NO: 734 - protein, 125 aa, Artificial Sequence
  Synthetic polypeptide
EVQLVESGGGLVQPGGSLRLSCAASGFTFSTYAMNWVRQAPGKGLEWVGRIRSKYNNYATYYADSVKGRFTISRDDSKNTLYLQMNSLRAEDTAVYYCVRHGNFGDSYVSWFAYWGQGTLVTVSS

SEQ ID NO: 735 - protein, 125 aa, Artificial Sequence
  Synthetic polypeptide
EVQLVESGGGLVQPGGSLRLSCAASGFTFSTYAMSWVRQAPGKGLEWVGRIRSKYNNYATYYADSVKGRFTISRDDSKNTLYLQMNSLRAEDTAVYYCVRHGNFGDSYVSWFAYWGQGTLVTVSS

SEQ ID NO: 736 - protein, 125 aa, Artificial Sequence
  Synthetic polypeptide
EVQLVESGGGLVQPGGSLRLSCAASGFTFSTYAMNWVRQAPGKGLEWVGRIRSKANNYATYYADSVKGRFTISRDDSKNTLYLQMNSLRAEDTAVYYCVRHGNFGDSYVSWFAYWGQGTLVTVSS

SEQ ID NO: 737 - protein, 125 aa, Artificial Sequence
  Synthetic polypeptide
EVQLVESGGGLVQPGGSLRLSCAASGFTFSTYAMNWVRQAPGKGLEWVGRIRSKYNNYATYYADSVKGRFTISRDDSKNTLYLQMNSLRAEDTAVYYCVRHGNFGDSYVSWFDYWGQGTLVTVSS

SEQ ID NO: 738 - protein, 125 aa, Artificial Sequence
  Synthetic polypeptide
EVQLVESGGGLVQPGGSLRLSCAASGFTFSTYAMSWVRQAPGKGLEWVGRIRSKANNYATYYADSVKGRFTISRDDSKNTLYLQMNSLRAEDTAVYYCVRHGNFGDSYVSWFDYWGQGTLVTVSS

SEQ ID NO: 739 - protein, 125 aa, Artificial Sequence
  Synthetic polypeptide
EVQLVESGGEVKKPGESLRLSCAASGFTFNTYAMNWVRQAPGKGLEWVGRIRSKYNNYATYYADSVKGRFTISRDDSKNTLYLQMNSLRAEDTAVYYCVRHGNFGNSYVSWFAYWGQGTLVTVSS

SEQ ID NO: 740 - protein, 123 aa, Artificial Sequence
  Synthetic polypeptide
EVQLVESGGGLVQPGGSLRLSCAASGFTFNTYAMNWVRQAPGKGLEWVGRIRSNGGSTYYADSVKGRFTISRDDSKNTLYLQMNSLRAEDTAVYYCVRHGNFGNSYVSWFAYWGQGTLVTVSS

SEQ ID NO: 741 - protein, 125 aa, Artificial Sequence
  Synthetic polypeptide
EVQLVESGGGLVQPGGSLRLSCAASGFTFNTYAMNWVRKAPGKGLEWVGRIRSKYNNYATYYADSVKGRFTISRDDSKNTLYLQMNSLRAEDTAVYYCVRHGNFGNSYVSWFAYWGQGTLVTVSS

SEQ ID NO: 742 - protein, 125 aa, Artificial Sequence
  Synthetic polypeptide
EVQLVESGGGLVQPGGSLRLSCAASGFTFSTYAMNWVRKAPGKGLEWVGRIRSKYNNYATYYADSVKGRFTISRDDSKNTLYLQMNSLRAEDTAVYYCVRHGNFGNSYVSWFAYWGQGTLVTVSS

SEQ ID NO: 743 - protein, 125 aa, Artificial Sequence
  Synthetic polypeptide
EVQLVESGGGLVQPGGSLRLSCAASGFTFSTYAMNWVRKAPGKGLEWVGRIRSKYNNYATYYADSVKGRFTISRDDSKNTLYLQMNSLRAEDTAVYYCVRHGNFGDSYVSWFAYWGQGTLVTVSS

SEQ ID NO: 744 - protein, 109 aa, Artificial Sequence
  Synthetic polypeptide
QAVVTQEPSLTVSPGGTVTLTCGSSTGAVTTSNYANWVQQKPGQAPRGLIGGTNKRAPGVPARFSGSLLGGKAALTLSGAQPEDEAEYYCALWYSNLWVFGGGTKLTVL

SEQ ID NO: 745 - protein, 109 aa, Artificial Sequence
  Synthetic polypeptide
QAVVTQPPSLTVSPGGTVTLTCGSSTGAVTTSNYANWVQQKPGQAPRGLIGGTNKRAPGVPARFSGSLLGGKAALTLSGAQPEDEAEYYCALWYSNLWVFGGGTKLTVL

SEQ ID NO: 746 - protein, 109 aa, Artificial Sequence
  Synthetic polypeptide
QAVVTQEPSLSVSPGGTVTLTCGSSTGAVTTSNYANWVQQKPGQAPRGLIGGTNKRAPGVPARFSGSLLGGKAALTLSGAQPEDEAEYYCALWYSNLWVFGGGTKLTVL

SEQ ID NO: 747 - protein, 109 aa, Artificial Sequence
  Synthetic polypeptide
QAVVTQEPSLTVSPGATVTLTCGSSTGAVTTSNYANWVQQKPGQAPRGLIGGTNKRAPGVPARFSGSLLGGKAALTLSGAQPEDEAEYYCALWYSNLWVFGGGTKLTVL

SEQ ID NO: 748 - protein, 109 aa, Artificial Sequence
  Synthetic polypeptide
QAVVTQEPSLTVSPGQTVTLTCGSSTGAVTTSNYANWVQQKPGQAPRGLIGGTNKRAPGVPARFSGSLLGGKAALTLSGAQPEDEAEYYCALWYSNLWVFGGGTKLTVL

SEQ ID NO: 749 - protein, 109 aa, Artificial Sequence
  Synthetic polypeptide
QAVVTQEPSLTVSPGGTVTLTCGSSTGAVTSSNYANWVQQKPGQAPRGLIGGTNKRAPGVPARFSGSLLGGKAALTLSGAQPEDEAEYYCALWYSNLWVFGGGTKLTVL

SEQ ID NO: 750 - protein, 109 aa, Artificial Sequence
  Synthetic polypeptide
QAVVTQEPSLTVSPGGTVTLTCGSSTGAVTSGHYANWVQQKPGQAPRGLIGGTNKRAPGVPARFSGSLLGGKAALTLSGAQPEDEAEYYCALWYSNLWVFGGGTKLTVL

SEQ ID NO: 751 - protein, 109 aa, Artificial Sequence
  Synthetic polypeptide
QAVVTQEPSLTVSPGGTVTLTCGSSTGAVTTSNYANWVQQKPGQAPRGLIYDTNKRAPGVPARFSGSLLGGKAALTLSGAQPEDEAEYYCALWYSNLWVFGGGTKLTVL

SEQ ID NO: 752 - protein, 109 aa, Artificial Sequence
  Synthetic polypeptide
QAVVTQEPSLTVSPGGTVTLTCGSSTGAVTTSNYANWVQQKPGQAPRGLIGGTNNRAPGVPARFSGSLLGGKAALTLSGAQPEDEAEYYCALWYSNLWVFGGGTKLTVL

SEQ ID NO: 753 - protein, 109 aa, Artificial Sequence
  Synthetic polypeptide
QAVVTQEPSLTVSPGGTVTLTCGSSTGAVTTSNYANWVQQKPGQAPRGLIGGTNKRASGVPARFSGSLLGGKAALTLSGAQPEDEAEYYCALWYSNLWVFGGGTKLTVL

SEQ ID NO: 754 - protein, 109 aa, Artificial Sequence
  Synthetic polypeptide
QAVVTQEPSLTVSPGGTVTLTCGSSTGAVTTSNYANWVQQKPGQAPRGLIGGTSNKHSWTPARFSGSLLGGKAALTLSGAQPEDEAEYYCALWYSNLWVFGGGTKLTVL

SEQ ID NO: 755 - protein, 109 aa, Artificial Sequence
  Synthetic polypeptide
QAVVTQEPSLTVSPGGTVTLTCGSSTGAVTTSNYANWVQQKPGQAPRGLIGGTNKRAPGVPDRFSGSLLGGKAALTLSGAQPEDEAEYYCALWYSNLWVFGGGTKLTVL

SEQ ID NO: 756 - protein, 109 aa, Artificial Sequence
  Synthetic polypeptide
QAVVTQEPSLTVSPGGTVTLTCGSSTGAVTTSNYANWVQQKPGQAPRGLIGGTNKRAPGVPARFSGSKSGGKAALTLSGAQPEDEAEYYCALWYSNLWVFGGGTKLTVL

SEQ ID NO: 757 - protein, 109 aa, Artificial Sequence
  Synthetic polypeptide
QAVVTQEPSLTVSPGGTVTLTCGSSTGAVTTSNYANWVQQKPGQAPRGLIGGTNKRAPGVPARFSGSSSGGKAALTLSGAQPEDEAEYYCALWYSNLWVFGGGTKLTVL

SEQ ID NO: 758 - protein, 109 aa, Artificial Sequence
  Synthetic polypeptide
QAVVTQEPSLTVSPGGTVTLTCGSSTGAVTTSNYANWVQQKPGQAPRGLIGGTNKRAPGVPARFSGSLLGGKAALTISGAQPEDEAEYYCALWYSNLWVFGGGTKLTVL

SEQ ID NO: 759 - protein, 109 aa, Artificial Sequence
  Synthetic polypeptide
QAVVTQEPSLTVSPGGTVTLTCGSSTGAVTTSNYANWVQQKPGQAPRGLIGGTNKRAPGVPARFSGSLLGGKAALTLSGAQAEDEAEYYCALWYSNLWVFGGGTKLTVL

SEQ ID NO: 760 - protein, 109 aa, Artificial Sequence
  Synthetic polypeptide
QAVVTQEPSLTVSPGGTVTLTCGSSTGAVTTSNYANWVQQKPGQAPRGLIGGTNKRAPGVPARFSGSLLGGKAALTLSGAQSEDEAEYYCALWYSNLWVFGGGTKLTVL

SEQ ID NO: 761 - protein, 109 aa, Artificial Sequence
  Synthetic polypeptide
QAVVTQEPSLTVSPGGTVTLTCGSSTGAVTTSNYANWVQQKPGQAPRGLIGGTNKRAPGVPARFSGSLLGGKAALTLSGAQPEDEADYYCALWYSNLWVFGGGTKLTVL

SEQ ID NO: 762 - protein, 109 aa, Artificial Sequence
  Synthetic polypeptide
QAVVTQEPSLTVSPGGTVTLTCGSSTGAVTTSNYANWVQQKPGQAPRGLIGGTNKRAPGVPARFSGSLLGGKAALTLSGAQPEDEAEYYCLLWYSNLWVFGGGTKLTVL

SEQ ID NO: 763 - protein, 109 aa, Artificial Sequence
  Synthetic polypeptide
QAVVTQEPSLTVSPGGTVTLTCGSSTGAVTTSNYANWVQQKPGQAPRGLIGGTNKRAPGVPARFSGSLLGGKAALTLSGAQPEDEAEYYCALWYSNHWVFGGGTKLTVL

SEQ ID NO: 764 - protein, 111 aa, Artificial Sequence
  Synthetic polypeptide
QAVVTQEPSLTVSPGGTVTLTCGSSTGAVTTSNYANWVQQKPGQAPRGLIGGTNKRAPGVPARFSGSLLGGKAALTLSGAQPEDEAEYYCALWYSNLWVFGGGTKLEIKGS

SEQ ID NO: 765 - protein, 112 aa, Artificial Sequence
  Synthetic polypeptide
EIVMTQSPATLSLSPGERATLSCRSSTGAVTTSNYANWVQQKPGQAPRGLIGGTNKRAPGVPARFSGSGSGTDFTLTISSLQPEDFAVYYCALWYSNLWVFGGGTKVEIKGS

SEQ ID NO: 766 - protein, 112 aa, Artificial Sequence
  Synthetic polypeptide
DIVMTQSPDSLAVSLGERATINCKSSTGAVTTSNYANWVQQKPGQPPKGLIGGTNKRAPGVPDRFSGSGSGTDFTLTISSLQAEDVAVYYCALWYSNLWVFGGGTKVEIKGS

SEQ ID NO: 767 - protein, 109 aa, Artificial Sequence
  Synthetic polypeptide
QAVVTQEPSLTVSPGGTVTLTCGSSTGAVTTSNYANWVQQKPGQAPRGLIGGTNKRAPGVPARFSGSLLGGKAALTDSGAQPEDEADYYCALWYSNHWVFGGGTKLTVL

SEQ ID NO: 768 - protein, 109 aa, Artificial Sequence
  Synthetic polypeptide
QAVVTQEPSLTVSPGGTVTLTCGSSTGAVTTSNYANWVQEKPGQAPRGLIGGTNKRAPGVPARFSGSLLGGKAALTLSGAQPEDEAEYYCALWYSNLWVFGGGTKLTVL

SEQ ID NO: 769 - protein, 107 aa, Artificial Sequence
  Synthetic polypeptide
QAVVTQEPSLTVSPGGTVTLTCGSSTGAVTTSNYANWVQQKPGKAPRGLIGGTNKRAPGVPARFSGSLLGGKAALTLSGAQPEDEAEYYCALWYSNLWVFGGGTKLT

SEQ ID NO: 770 - protein, 109 aa, Artificial Sequence
  Synthetic polypeptide
QAVVTQEPSLTVSPGGTVTLTCGSSTGAVTTSNYANWVQQKPGTAPRGLIGGTNKRAPGVPARFSGSLLGGKAALTLSGAQPEDEAEYYCALWYSNLWVFGGGTKLTVL

SEQ ID NO: 771 - protein, 109 aa, Artificial Sequence
  Synthetic polypeptide
QAVVTQEPSLTVSPGGTVTLTCGSSTGAVTTSNYANWVQQKPGSPPRGLIGGTNKRAPGVPARFSGSLLGGKAALTLSGAQPEDEAEYYCALWYSNLWVFGGGTKLTVL

SEQ ID NO: 772 - protein, 109 aa, Artificial Sequence
  Synthetic polypeptide
QAVVTQEPSLTVSPGGTVTLTCGSSTGAVTTSNYANWVQQKPGQPPRGLIGGTNKRAPGVPARFSGSLLGGKAALTLSGAQPEDEAEYYCALWYSNLWVFGGGTKLTVL

SEQ ID NO: 773 - protein, 109 aa, Artificial Sequence
  Synthetic polypeptide
QAVVTQEPSLTVSPGGTVTLTCGSSTGAVTTSNYANWVQQKPGQGPRGLIGGTNKRAPGVPARFSGSLLGGKAALTLSGAQPEDEAEYYCALWYSNLWVFGGGTKLTVL

SEQ ID NO: 774 - protein, 109 aa, Artificial Sequence
  Synthetic polypeptide
QAVVTQEPSLTVSPGGTVTLTCGSSTGAVTTSNYANWVQQKPGQSPRGLIGGTNKRAPGVPARFSGSLLGGKAALTLSGAQPEDEAEYYCALWYSNLWVFGGGTKLTVL

SEQ ID NO: 775 - protein, 109 aa, Artificial Sequence
  Synthetic polypeptide
QAVVTQEPSLTVSPGGTVTLTCGSSTGAVTTSNYANWVQQKPGQDPRGLIGGTNKRAPGVPARFSGSLLGGKAALTLSGAQPEDEAEYYCALWYSNLWVFGGGTKLTVL

SEQ ID NO: 776 - protein, 109 aa, Artificial Sequence
  Synthetic polypeptide
QAVVTQEPSLTVSPGGTVTLTCGSSTGAVTTSNYANWVQQKPGQAPRGLIGGTNKRAPGVPARFSGSLLGGKAALTISGAQPEDEADYYCALWYSNHWVFGGGTKLTVL

SEQ ID NO: 777 - protein, 109 aa, Artificial Sequence
  Synthetic polypeptide
QAVVTQEPSLTVSPGGTVTLTCGSSTGAVTTSNYANWVQQKPGQAPRGLIGGTNKRAPGVPARFSGSLLGGKAALTISGAQPEDEAEYYCALWYSNHWVFGGGTKLTVL

SEQ ID NO: 778 - protein, 109 aa, Artificial Sequence
  Synthetic polypeptide
QAVVTQEPSLTVSPGGTVTLTCGSSTGAVTTSNYANWVQQKPGKAPRGLIGGTNKRAPGVPARFSGSLLGGKAALTISGAQPEDEAEYYCALWYSNHWVFGGGTKLTVL

SEQ ID NO: 779 - protein, 109 aa, Artificial Sequence
  Synthetic polypeptide
QAVVTQEPSLTVSPGGTVTLTCGSSTGAVTTSNYANWVQQKPGQSPRGLIGGTNKRAPGVPARFSGSLLGGKAALTISGAQPEDEAEYYCALWYSNHWVFGGGTKLTVL

SEQ ID NO: 780 - protein, 109 aa, Artificial Sequence
  Synthetic polypeptide
QAVVTQEPSLTVSPGGTVTLTCGSSTGAVTTSNYANWVQQKPGKSPRGLIGGTNKRAPGVPARFSGSLLGGKAALTISGAQPEDEAEYYCALWYSNHWVFGGGTKLTVL

SEQ ID NO: 781 - protein, 109 aa, Artificial Sequence
  Synthetic polypeptide
QAVVTQEPSLTVSPGGTVTLTCGSSTGAVTTSNYANWVQQKPGKAPRGLIGGTNKRAPGVPARFSGSLLGGKAALTISGAQPEDEADYYCALWYSNHWVFGGGTKLTVL

SEQ ID NO: 782 - protein, 109 aa, Artificial Sequence
  Synthetic polypeptide
QAVVTQEPSLTVSPGGTVTLTCGSSTGAVTTSNYANWVQQKPGQSPRGLIGGTNKRAPGVPARFSGSLLGGKAALTISGAQPEDEADYYCALWYSNHWVFGGGTKLTVL

SEQ ID NO: 783 - protein, 109 aa, Artificial Sequence
  Synthetic polypeptide
QAVVTQEPSLTVSPGGTVTLTCGSSTGAVTTSNYANWVQQKPGKSPRGLIGGTNKRAPGVPARFSGSLLGGKAALTISGAQPEDEADYYCALWYSNHWVFGGGTKLTVL

SEQ ID NO: 784 - protein, 12 aa, Artificial Sequence
  Synthetic oligopeptide
TLSSGNIENYVH

SEQ ID NO: 785 - protein, 7 aa, Artificial Sequence
  Synthetic oligopeptide
DDDKRPD

SEQ ID NO: 786 - protein, 9 aa, Artificial Sequence
  Synthetic oligopeptide
HSYVSSFNV

SEQ ID NO: 787 - protein, 5 aa, Artificial Sequence
  Synthetic oligopeptide
SFPMA

SEQ ID NO: 788 - protein, 17 aa, Artificial Sequence
  Synthetic oligopeptide
TISTSGGRTYYRDSVKG

SEQ ID NO: 789 - protein, 10 aa, Artificial Sequence
  Synthetic oligopeptide
FRQYSGGFDY

SEQ ID NO: 790 - protein, 13 aa, Artificial Sequence
  Synthetic oligopeptide
TLSSGNIENNYVH

SEQ ID NO: 791 - protein, 8 aa, Artificial Sequence
  Synthetic oligopeptide
GFTFNTYA

SEQ ID NO: 792 - protein, 10 aa, Artificial Sequence
  Synthetic oligopeptide
IRSKYNNYAT

SEQ ID NO: 793 - protein, 16 aa, Artificial Sequence
  Synthetic oligopeptide
VRHGNFGNSYVSWFAY

SEQ ID NO: 794 - protein, 9 aa, Artificial Sequence
  Synthetic oligopeptide
TGAVTTSNY

SEQ ID NO: 795 - skipped

SEQ ID NO: 796 - protein, 5 aa, Artificial Sequence
  Synthetic oligopeptide
RYTMH

SEQ ID NO: 797 - protein, 17 aa, Artificial Sequence
  Synthetic oligopeptide
YINPSRGYTNYNQKFKD

SEQ ID NO: 798 - protein, 10 aa, Artificial Sequence
  Synthetic oligopeptide
YYDDHYSLDY

SEQ ID NO: 799 - protein, 10 aa, Artificial Sequence
  Synthetic oligopeptide
SASSSVSYMN

SEQ ID NO: 800 - protein, 7 aa, Artificial Sequence
  Synthetic oligopeptide
DTSKLAS

SEQ ID NO: 801 - protein, 9 aa, Artificial Sequence
  Synthetic oligopeptide
QQWSSNPFT

SEQ ID NO: 802 - protein, 5 aa, Artificial Sequence
  Synthetic oligopeptide
SYGMH

SEQ ID NO: 803 - protein, 17 aa, Artificial Sequence
  Synthetic oligopeptide
VISYDGSNKYYADSVKG

SEQ ID NO: 804 - protein, 16 aa, Artificial Sequence
  Synthetic oligopeptide
LSPYCTNGVCWDAFDI

SEQ ID NO: 805 - protein, 11 aa, Artificial Sequence
  Synthetic oligopeptide
RASQTISNYLN

SEQ ID NO: 806 - protein, 7 aa, Artificial Sequence
  Synthetic oligopeptide
AASTLQS

SEQ ID NO: 807 - protein, 9 aa, Artificial Sequence
  Synthetic oligopeptide
QQFNSYPRT

SEQ ID NO: 808 - protein, 5 aa, Artificial Sequence
  Synthetic oligopeptide
DYAMS

SEQ ID NO: 809 - protein, 19 aa, Artificial Sequence
  Synthetic oligopeptide
FIRSKAYGGTTEYAASVKG

SEQ ID NO: 810 - protein, 11 aa, Artificial Sequence
  Synthetic oligopeptide
QLWLLQDAFDI

SEQ ID NO: 811 - protein, 11 aa, Artificial Sequence
  Synthetic oligopeptide
RASQGISNYLA

SEQ ID NO: 812 - protein, 9 aa, Artificial Sequence
  Synthetic oligopeptide
QQSYSTPPT

SEQ ID NO: 813 - protein, 6 aa, Artificial Sequence
  Synthetic oligopeptide
SRNWWS

SEQ ID NO: 814 - protein, 16 aa, Artificial Sequence
  Synthetic oligopeptide
DIYHSGSTNYNPSLKS

SEQ ID NO: 815 - protein, 11 aa, Artificial Sequence
  Synthetic oligopeptide
GYTSCRDAFDI

SEQ ID NO: 816 - protein, 11 aa, Artificial Sequence
  Synthetic oligopeptide
RASQGIGNYLA

SEQ ID NO: 817 - protein, 7 aa, Artificial Sequence
  Synthetic oligopeptide
WASIRES

SEQ ID NO: 818 - protein, 9 aa, Artificial Sequence
  Synthetic oligopeptide
QQYYSNPQT

SEQ ID NO: 819 - protein, 5 aa, Artificial Sequence
  Synthetic oligopeptide
GYYWS

SEQ ID NO: 820 - protein, 16 aa, Artificial Sequence
  Synthetic oligopeptide
EINHSGSTNYNPSLKS

SEQ ID NO: 821 - protein, 18 aa, Artificial Sequence
  Synthetic oligopeptide
GRGRFLGWLLGGSNWFDP

SEQ ID NO: 822 - protein, 11 aa, Artificial Sequence
  Synthetic oligopeptide
RASQGISNYLN

SEQ ID NO: 823 - protein, 7 aa, Artificial Sequence
  Synthetic oligopeptide
DASNLET

SEQ ID NO: 824 - protein, 9 aa, Artificial Sequence
  Synthetic oligopeptide
QQSYSTPYT

SEQ ID NO: 825 - protein, 11 aa, Artificial Sequence
  Synthetic oligopeptide
GPDRMGHGFDI

SEQ ID NO: 826 - protein, 11 aa, Artificial Sequence
  Synthetic oligopeptide
RASQSISSYLN

SEQ ID NO: 827 - protein, 7 aa, Artificial Sequence
  Synthetic oligopeptide
QQSYSSP

SEQ ID NO: 828 - protein, 7 aa, Artificial Sequence
  Synthetic oligopeptide
SNSAAWN

SEQ ID NO: 829 - protein, 18 aa, Artificial Sequence
  Synthetic oligopeptide
RTYYRSKWYNDYAVSVKS

SEQ ID NO: 830 - protein, 15 aa, Artificial Sequence
  Synthetic oligopeptide
DRRRIAARQYYGMDV

SEQ ID NO: 831 - protein, 12 aa, Artificial Sequence
  Synthetic oligopeptide
RASQSVSSNYLA

SEQ ID NO: 832 - protein, 7 aa, Artificial Sequence
  Synthetic oligopeptide
GASSRAT

SEQ ID NO: 833 - protein, 7 aa, Artificial Sequence
  Synthetic oligopeptide
QKYNSAP

SEQ ID NO: 834 - protein, 5 aa, Artificial Sequence
  Synthetic oligopeptide
SYAMG

SEQ ID NO: 835 - protein, 17 aa, Artificial Sequence
  Synthetic oligopeptide
AVSGSGGSTYYADSVKG

SEQ ID NO: 836 - protein, 12 aa, Artificial Sequence
  Synthetic oligopeptide
AKFLGHYYGMDV

SEQ ID NO: 837 - protein, 9 aa, Artificial Sequence
  Synthetic oligopeptide
LQHNAYPYT

SEQ ID NO: 838 - protein, 7 aa, Artificial Sequence
  Synthetic oligopeptide
NPRMGVS

SEQ ID NO: 839 - protein, 16 aa, Artificial Sequence
  Synthetic oligopeptide
HIFPSDAKAHSASLKS

SEQ ID NO: 840 - protein, 13 aa, Artificial Sequence
  Synthetic oligopeptide
ILGEYYPPAWFDP

SEQ ID NO: 841 - protein, 17 aa, Artificial Sequence
  Synthetic oligopeptide
KSSQSVLYSSNNKNYLA

SEQ ID NO: 842 - protein, 7 aa, Artificial Sequence
  Synthetic oligopeptide
WASTRES

SEQ ID NO: 843 - protein, 9 aa, Artificial Sequence
  Synthetic oligopeptide
QQYLKIPYT

SEQ ID NO: 844 - protein, 5 aa, Artificial Sequence
  Synthetic oligopeptide
IYAMN

SEQ ID NO: 845 - protein, 19 aa, Artificial Sequence
  Synthetic oligopeptide
RIRSKYNNYATYYADSVKS

SEQ ID NO: 846 - protein, 14 aa, Artificial Sequence
  Synthetic oligopeptide
HGNFGNSYVSFFAY

SEQ ID NO: 847 - protein, 14 aa, Artificial Sequence
  Synthetic oligopeptide
GSSTGAVTSGYYPN

SEQ ID NO: 848 - protein, 7 aa, Artificial Sequence
  Synthetic oligopeptide
GTKFLAP

SEQ ID NO: 849 - protein, 9 aa, Artificial Sequence
  Synthetic oligopeptide
ALWYSNRWV

SEQ ID NO: 850 - protein, 5 aa, Artificial Sequence
  Synthetic oligopeptide
KYAMN

SEQ ID NO: 851 - protein, 14 aa, Artificial Sequence
  Synthetic oligopeptide
HGNFGNSYISYWAY

SEQ ID NO: 852 - protein, 14 aa, Artificial Sequence
  Synthetic oligopeptide
RSSTGAVTSGYYPN

SEQ ID NO: 853 - protein, 7 aa, Artificial Sequence
  Synthetic oligopeptide
ATDMRPS

SEQ ID NO: 854 - protein, 5 aa, Artificial Sequence
  Synthetic oligopeptide
SYAMN

SEQ ID NO: 855 - protein, 19 aa, Artificial Sequence
  Synthetic oligopeptide
RIRSKYNNYATYYADSVKG

SEQ ID NO: 856 - protein, 14 aa, Artificial Sequence
  Synthetic oligopeptide
HGNFGNSYLSFWAY

SEQ ID NO: 857 - protein, 14 aa, Artificial Sequence
  Synthetic oligopeptide
GSSTGAVTSGNYPN

SEQ ID NO: 858 - protein, 9 aa, Artificial Sequence
  Synthetic oligopeptide
VLWYSNRWV

SEQ ID NO: 859 - protein, 5 aa, Artificial Sequence
  Synthetic oligopeptide
RYAMN

SEQ ID NO: 860 - protein, 14 aa, Artificial Sequence
  Synthetic oligopeptide
HGNFGNSYLSYFAY

SEQ ID NO: 861 - protein, 5 aa, Artificial Sequence
  Synthetic oligopeptide
VYAMN

SEQ ID NO: 862 - protein, 19 aa, Artificial Sequence
  Synthetic oligopeptide
RIRSKYNNYATYYADSVKK

SEQ ID NO: 863 - protein, 14 aa, Artificial Sequence
  Synthetic oligopeptide
HGNFGNSYLSWWAY

SEQ ID NO: 864 - protein, 14 aa, Artificial Sequence
  Synthetic oligopeptide
HGNFGNSYTSYYAY

SEQ ID NO: 865 - protein, 5 aa, Artificial Sequence
  Synthetic oligopeptide
GYAMN

SEQ ID NO: 866 - protein, 19 aa, Artificial Sequence
  Synthetic oligopeptide
RIRSKYNNYATYYADSVKE

SEQ ID NO: 867 - protein, 14 aa, Artificial Sequence
  Synthetic oligopeptide
HRNFGNSYLSWFAY

SEQ ID NO: 868 - protein, 14 aa, Artificial Sequence
  Synthetic oligopeptide
HGNFGNSYISWWAY

SEQ ID NO: 869 - protein, 14 aa, Artificial Sequence
  Synthetic oligopeptide
HGNFGNSYVSWWAY

SEQ ID NO: 870 - protein, 5 aa, Artificial Sequence
  Synthetic oligopeptide
GYGMH

SEQ ID NO: 871 - protein, 17 aa, Artificial Sequence
  Synthetic oligopeptide
VIWYDGSKKYYVDSVKG

SEQ ID NO: 872 - protein, 9 aa, Artificial Sequence
  Synthetic oligopeptide
QMGYWHFDL

SEQ ID NO: 873 - protein, 11 aa, Artificial Sequence
  Synthetic oligopeptide
RASQSVSSYLA

SEQ ID NO: 874 - protein, 7 aa, Artificial Sequence
  Synthetic oligopeptide
DASNRAT

SEQ ID NO: 875 - protein, 10 aa, Artificial Sequence
  Synthetic oligopeptide
QQRSNWPPLT

SEQ ID NO: 876 - protein, 11 aa, Artificial Sequence
  Synthetic oligopeptide
RASQGISSALA

SEQ ID NO: 877 - protein, 7 aa, Artificial Sequence
  Synthetic oligopeptide
YASSLQS

SEQ ID NO: 878 - DNA, 2244 bp, Artificial Sequence; identical to SEQ ID NO: 451
  Synthetic polynucleotide

SEQ ID NO: 879 - protein, 711 aa, Artificial Sequence
  Synthetic polypeptide
SDNHGGGSQTVVTQEPSLTVSPGGTVTLTCRSSTGAVTTSNYANWVQQKPGQAPRGLIGGTNKRAPGTPARFSGSLLGGKAALTLSGVQPEDEAEYYCALWYSNLWVFGGGTKLTVLGGGGSGGGGSGGGGSEVQLVESGGGLVQPGGSLKLSCAASGFTFNTYAMNWVRQAPGKGLEWVARIRSKYNNYATYYADSVKDRFTISRDDSKNTAYLQMNNLKTEDTAVYYCVRHGNFGNSYVSWFAYWGQGTLVTVSSGGGGSQVQLKQSGPGLVQPSQSLSITCTVSGFSLTNYGVHWVRQSPGKGLEWLGVIWSGGNTDYNTPFTSRLSINKDNSKSQVFFKMNSLQSQDTAIYYCARALTYYDYEFAYWGQGTLVTVSAASTKGPSVFPLAPSSKSTSGGTAALGCLVKDYFPEPVTVSWNSGALTSGVHTFPAVLQSSGLYSLSSVVTVPSSSLGTQTYICNVNHKPSNTKVDKKVEPKSCDKTHTCPPCPAPELLGGPSVFLFPPKPKDTLMISRTPEVTCVVVDVSHEDPEVKFNWYVDGVEVHNAKTKPREEQYQSTYRVVSVLTVLHQDWLNGKEYKCKVSNKALPAPIEKTISKAKGQPREPQVYTLPPSREEMTKNQVSLTCLVKGFYPSDIAVEWESNGQPENNYKTTPPVLDSDGSFFLYSKLTVDKSRWQQGNVFSCSVMHEALHNHYTQKSLSLSPGK

SEQ ID NO: 880 - DNA, 777 bp, Artificial Sequence
  Synthetic polynucleotide
caaggccagtctggccagtatgggtcctgcagttggaactatgtacacatattcatggattgcggctcgagcggtggcagcggtggctctggtggctcaggtggaggctcgggcggtgggagcggcggttctgacatccagatgactcagtctcctagctccctgtccgcctctgtgggggaccgagtcaccatcacatgcagagccagccaggatatttctagttacctgaactggtatcagcagaagcccggaaaagcacctaagctgctgatctactatacctccaggctgcactctggcgtgcccagtcggttcagtggctcagggagcggaaccgacttcacttttaccatctcaagcctgcagccagaggatattgccacatactattgtcagcagggcaatacactgccctacacttttggccaggggaccaaggtggaaatcaaacgtacggtggctgcaccatctgtcttcatcttcccgccatctgatgagcagttgaaatctggaactgcctctgttgtgtgcctgctgaataacttctatcccagagaggccaaagtacagtggaaggtggataacgccctccaatcgggtaactcccaggagagtgtcacagagcaggacagcaaggacagcacctacagcctcagcagcaccctgacgctgagcaaagcagactacgagaaacacaaagtctacgcctgcgaagtcacccatcagggcctgagctcgcccgtcacaaagagcttcaacaggggagagtgttag

SEQ ID NO: 881 - protein, 258 aa, Artificial Sequence
  Synthetic polypeptide
QGQSGQYGSCSWNYVHIFMDCGSSGGSGGSGGSGGGSGGGSGGSDIQMTQSPSSLSASVGDRVTITCRASQDISSYLNWYQQKPGKAPKLLIYYTSRLHSGVPSRFSGSGSGTDFTFTISSLQPEDIATYYCQQGNTLPYTFGQGTKVEIKRTVAAPSVFIFPPSDEQLKSGTASVVCLLNNFYPREAKVQWKVDNALQSGNSQESVTEQDSKDSTYSLSSTLTLSKADYEKHKVYACEVTHQGLSSPVTKSFNRGEC

SEQ ID NO: 882 - DNA, 2112 bp, Artificial Sequence; identical to SEQ ID NO: 459
  Synthetic polynucleotide

SEQ ID NO: 883 - protein, 703 aa, Artificial Sequence; identical to SEQ ID NO: 460
  Synthetic polypeptide

SEQ ID NO: 884-887 - skipped (4 entries)

SEQ ID NO: 888 - protein, 9 aa, Artificial Sequence
  Synthetic oligopeptide
QQYYSTLTF

SEQ ID NO: 889 - protein, 7 aa, Artificial Sequence
  Synthetic oligopeptide
DASSLGS

SEQ ID NO: 890 - protein, 11 aa, Artificial Sequence
  Synthetic oligopeptide
WASQGISSYLA

SEQ ID NO: 891 - protein, 17 aa, Artificial Sequence
  Synthetic oligopeptide
AIWYNGRKQDYADSVKG

SEQ ID NO: 892 - protein, 9 aa, Artificial Sequence
  Synthetic oligopeptide
QQRSNWPWT

SEQ ID NO: 893 - protein, 7 aa, Artificial Sequence
  Synthetic oligopeptide
DASSLES

SEQ ID NO: 894 - protein, 9 aa, Artificial Sequence
  Synthetic oligopeptide
QQFNSYPIT

SEQ ID NO: 895 - DNA, 2226 bp, Artificial Sequence
  Synthetic polynucleotide
ggttatcggtggggttgcgagtggaattgcggtgggattactactggctcgagcggtggcagcggtggctctggtggtctgagcggccgttccgataatcatggcggcggttctcagaccgtggtcacacaggagccctcactgacagtgagccctggcgggaccgtcacactgacttgtcgcagttcaactggcgccgtgactaccagcaattacgctaactgggtccagcagaaaccaggacaggcaccacgaggactgatcggaggaactaataagagagcaccaggaacccctgcaaggttctccggatctctgctggggggaaaagccgctctgacactgagcggcgtgcagcctgaggacgaagctgagtactattgcgcactgtggtactccaacctgtgggtgtttggcgggggaactaagctgaccgtcctgggaggaggaggaagcggaggaggagggagcggaggaggaggatccgaagtgcagctggtcgagagcggaggaggactggtgcagccaggaggatccctgaagctgtcttgtgcagccagtggcttcaccttcaacacttacgcaatgaactgggtgcggcaggcacctgggaagggactggaatgggtcgcccggatcagatctaaatacaataactatgccacctactatgctgacagtgtgaaggataggttcaccatttcacgcgacgatagcaaaaacacagcttatctgcagatgaataacctgaagaccgaggatacagcagtgtactattgcgtcagacacggcaatttcgggaactcttacgtgagttggtttgcctattggggacaggggacactggtcaccgtctcctcaggaggtggtggatcccaggtgcagctgaaacagagcggcccgggcctggtgcagccgagccagagcctgagcattacctgcaccgtgagcggctttagcctgaccaactatggcgtgcattgggtgcgccagagcccgggcaaaggcctggaatggctgggcgtgatttggagcggcggcaacaccgattataacaccccgtttaccagccgcctgagcattaacaaagataacagcaaaagccaggtgttttttaaaatgaacagcctgcaaagccaggataccgcgatttattattgcgcgcgcgcgctgacctattatgattatgaatttgcgtattggggccagggcaccctggtgaccgtgagcgcggctagcaccaagggcccatcggtcttccccctggcaccctcctccaagagcacctctgggggcacagcggccctgggctgcctggtcaaggactacttccccgaaccggtgacggtgtcgtggaactcaggcgccctgaccagcggcgtgcacaccttcccggctgtcctacagtcctcaggactctactccctcagcagcgtggtgaccgtgccctccagcagcttgggcacccagacctacatctgcaacgtgaatcacaagcccagcaacaccaaggtggacaagaaagttgagcccaaatcttgtgacaaaactcacacatgcccaccgtgcccagcacctgaactcctggggggaccgtcagtcttcctcttccccccaaaacccaaggacaccctcatgatctcccggacccctgaggtcacatgcgtggtggtggacgtgagccacgaagaccctgaggtcaagttcaactggtacgtggacggcgtggaggtgcataatgccaagacaaagccgcgggaggagcagtaccagagcacgtaccgtgtggtcagcgtcctcaccgtcctgcaccaggactggctgaatggcaaggagtacaagtgcaaggtctccaacaaagccctcccagcccccatcgagaaaaccatctccaaagccaaagggcagccccgagaaccacaggtgtacaccctgcccccatcccgggaggagatgaccaagaaccaggtcagcctgacctgcctggtcaaaggcttctatcccagcgacatcgccgtggagtgggagagcaatgggcagccggagaacaactacaagaccacgcctcccgtgctggactccgacggctccttcttcctctacagcaagctcaccgtggacaagagcaggtggcagcaggggaacgtcttctcatgctccgtgatgcatgaggctctgcacaaccactacacgcagaagagcctctccctgtctccgggtaaatga

SEQ ID NO: 896 - protein, 7 aa, Artificial Sequence
  Synthetic oligopeptide
GPRSFGL

SEQ ID NO: 897 - protein, 6 aa, Artificial Sequence
  Synthetic oligopeptide
GPRSFG

SEQ ID NO: 898 - protein, 12 aa, Artificial Sequence
  Synthetic oligopeptide
NTLSGRSENHSG

SEQ ID NO: 899 - protein, 12 aa, Artificial Sequence
  Synthetic oligopeptide
NTLSGRSGNHGS

SEQ ID NO: 900 - protein, 12 aa, Artificial Sequence
  Synthetic oligopeptide
TSTSGRSANPRG

SEQ ID NO: 901 - protein, 8 aa, Artificial Sequence
  Synthetic oligopeptide
TSGRSANP

SEQ ID NO: 902 - protein, 8 aa, Artificial Sequence
  Synthetic oligopeptide
VAGRSMRP

SEQ ID NO: 903 - protein, 8 aa, Artificial Sequence
  Synthetic oligopeptide
VVPEGRRS

SEQ ID NO: 904 - protein, 8 aa, Artificial Sequence
  Synthetic oligopeptide
ILPRSPAF

SEQ ID NO: 905 - protein, 8 aa, Artificial Sequence
  Synthetic oligopeptide
MVLGRSLL

SEQ ID NO: 906 - protein, 8 aa, Artificial Sequence
  Synthetic oligopeptide
QGRAITFI

SEQ ID NO: 907 - protein, 8 aa, Artificial Sequence
  Synthetic oligopeptide
SPRSIMLA

SEQ ID NO: 908 - protein, 8 aa, Artificial Sequence
  Synthetic oligopeptide
SMLRSMPL

SEQ ID NO: 909 - protein, 13 aa, Artificial Sequence
  Synthetic oligopeptide
ISSGLLSGRSDNH

SEQ ID NO: 910 - protein, 22 aa, Artificial Sequence
  Synthetic polypeptide
ISSGLLSSGGSGGSLSGRSDNH

SEQ ID NO: 911 - protein, 22 aa, Artificial Sequence
  Synthetic polypeptide
AVGLLAPPGGTSTSGRSANPRG

SEQ ID NO: 912 - protein, 22 aa, Artificial Sequence
  Synthetic polypeptide
TSTSGRSANPRGGGAVGLLAPP

SEQ ID NO: 913 - protein, 24 aa, Artificial Sequence
  Synthetic polypeptide
VHMPLGFLGPGGTSTSGRSANPRG

SEQ ID NO: 914 - protein, 24 aa, Artificial Sequence
  Synthetic polypeptide
TSTSGRSANPRGGGVHMPLGFLGP

SEQ ID NO: 915 - protein, 18 aa, Artificial Sequence
  Synthetic oligopeptide
AVGLLAPPGGLSGRSDNH

SEQ ID NO: 916 - protein, 18 aa, Artificial Sequence
  Synthetic oligopeptide
LSGRSDNHGGAVGLLAPP

SEQ ID NO: 917 - protein, 20 aa, Artificial Sequence
  Synthetic oligopeptide
VHMPLGFLGPGGLSGRSDNH

SEQ ID NO: 918 - protein, 20 aa, Artificial Sequence
  Synthetic oligopeptide
LSGRSDNHGGVHMPLGFLGP

SEQ ID NO: 919 - protein, 22 aa, Artificial Sequence
  Synthetic polypeptide
LSGRSDNHGGSGGSISSGLLSS

SEQ ID NO: 920 - protein, 22 aa, Artificial Sequence
  Synthetic polypeptide
LSGRSGNHGGSGGSISSGLLSS

SEQ ID NO: 921 - protein, 22 aa, Artificial Sequence
  Synthetic polypeptide
ISSGLLSSGGSGGSLSGRSGNH

SEQ ID NO: 922 - protein, 22 aa, Artificial Sequence
  Synthetic polypeptide
LSGRSDNHGGSGGSQNQALRMA

SEQ ID NO: 923 - protein, 22 aa, Artificial Sequence
  Synthetic polypeptide
QNQALRMAGGSGGSLSGRSDNH

SEQ ID NO: 924 - protein, 22 aa, Artificial Sequence
  Synthetic polypeptide
LSGRSGNHGGSGGSQNQALRMA

SEQ ID NO: 925 - protein, 22 aa, Artificial Sequence
  Synthetic polypeptide
QNQALRMAGGSGGSLSGRSGNH

SEQ ID NO: 926 - protein, 13 aa, Artificial Sequence
  Synthetic oligopeptide
ISSGLLSGRSGNH

What is claimed is:

1. An isolated single chain variable antibody fragment that binds the epsilon chain of CD3 (CD3ε) comprising a variable heavy chain complementarity determining region 1 (VH CDR1) comprising the amino acid sequence TYAMN (SEQ ID NO: 53); a variable heavy chain complementarity determining region 2 (VH CD2) comprising the amino acid sequence RIRSKYNNYATYYADSVKD (SEQ ID NO: 54); a variable heavy chain complementarity determining region 3 (VH CDR3) comprising the amino acid sequence HGNFGNSYVSWFAY (SEQ ID NO: 55), a variable light chain complementarity determining region 1 (VL CDR1) comprising the amino acid sequence RSSTGAVTTSNYAN (SEQ ID NO: 56); a variable light chain complementarity determining region 2 (VL CDR2) comprising the amino acid sequence GTNKRAP (SEQ ID NO: 57); and a variable light chain complementarity determining region 3 (VL CDR3) comprising the amino acid sequence ALWYSNLWV (SEQ ID NO: 58).

2. The isolated single chain variable antibody fragment of claim 1, wherein the AB comprises a variable heavy chain (Hv) comprising the amino acid sequence of SEQ ID NO: 4 and a variable light chain (Lv) comprising the amino acid sequence of SEQ ID NO: 2.

3. The isolated single chain variable antibody fragment of claim 1, wherein the scFv fragment comprises the amino acid sequence of SEQ ID NO: 6 or the amino acid sequence of SEQ ID NO: 30.

4. The isolated single chain variable antibody fragment of claim 1, wherein the AB comprises the amino acid sequence of SEQ ID NO: 587.

5. The isolated single chain variable antibody fragment of claim 1, wherein the AB comprises the amino acid sequence of SEQ ID NO: 588.

6. The isolated single chain variable antibody fragment of claim 1 comprising an agent conjugated to the antibody.

7. The isolated single chain variable antibody fragment of claim 6, wherein the agent is a therapeutic agent, an antineoplastic agent, a toxin or fragment thereof, a detectable moiety or a diagnostic agent.

8. The isolated single chain variable antibody fragment of claim 6, wherein the agent is conjugated to the antibody via a linker.

9. A pharmaceutical composition comprising an antibody as in any of claims 1 to 8 and a carrier.

10. A pharmaceutical composition comprising an antibody as in any of claims 1 to 5 and a carrier.

11. An activatable antibody that in an activated state binds the epsilon chain of CD3 (CD3ε), the activatable antibody comprising:
an antibody or an antigen binding fragment thereof (AB) that specifically binds to CD3ε;
a masking moiety (MM) that inhibits the binding of the AB to CD3ε when the activatable antibody is in an uncleaved state; and
a cleavable moiety (CM) coupled to the AB, wherein the CM is a polypeptide that functions as a substrate for a protease.

12. The activatable antibody of claim 11, wherein the MM has a dissociation constant for binding to the AB that is selected from the group consisting of: greater than the dissociation constant of the AB to CD3ε; equivalent to the dissociation constant of the AB to CD3ε; and less than the dissociation constant of the AB to CD3ε.

13. The activatable antibody of claim 11, wherein the MM does not interfere or compete with the AB for binding to CD3ε when the activatable antibody is in a cleaved state.

14. The activatable antibody of claim 11, wherein the MM is a polypeptide of no more than 40 amino acids in length.

15. The activatable antibody of claim 11, wherein the MM polypeptide sequence is different from that of CD3ε and wherein the MM polypeptide sequence is no more than 50% identical to any natural binding partner of the AB.

16. The activatable antibody of claim 11, wherein the MM comprises a sequence selected from the group consisting of the sequences shown in Table 7 or Table 8.

17. The activatable antibody of claim 11, wherein the protease is produced by a tumor that is in proximity to cells that express CD3ε in a tissue and/or produced by a tumor that is co-localized with CD3ε in a tissue, and wherein the protease cleaves the CM in the activatable antibody when the activatable antibody is exposed to the protease.

18. The activatable antibody of claim 11, wherein the CM is a polypeptide of up to 15 amino acids in length.

19. The activatable antibody of claim 11, wherein the CM is a substrate for a protease selected from the group consisting of the proteases shown in Table 3 or wherein the CM comprises an amino acid sequence selected from the group consisting of SEQ ID NO: 67-86, 321-341, and 896-926.

20. The activatable antibody of claim 11, wherein the antigen binding fragment thereof is selected from the group consisting of a Fab fragment, a F(ab′)₂ fragment, a scFv, a scab, a dAb, a single domain heavy chain antibody, and a single domain light chain antibody.

21. The activatable antibody of claim 11, wherein the activatable antibody in the uncleaved state has the structural arrangement from N-terminus to C-terminus as follows: MM-CM-AB or AB-CM-MM.

22. The activatable antibody of claim 11, wherein the activatable antibody comprises a linking peptide between the MM and the CM.

23. The activatable antibody of claim 11, wherein the activatable antibody comprises a linking peptide between the CM and the AB.

24. The activatable antibody of claim 11, wherein the activatable antibody comprises a first linking peptide (LP1) and a second linking peptide (LP2), and wherein the activatable antibody in the uncleaved state has the structural arrangement from N-terminus to C-terminus as follows: MM-LP1-CM-LP2-AB or AB-LP2-CM-LP1-MM.

25. The activatable antibody of claim 24, wherein the two linking peptides are not identical to each other.

26. The activatable antibody of claim 24, wherein each of LP1 and LP2 is a peptide of about 1 to 20 amino acids in length.

27. The activatable antibody as in any of claims 11 to 26, wherein the AB comprises a VH CDR1 comprising the amino acid sequence TYAMN (SEQ ID NO: 53); a VH CD2 comprising the amino acid sequence RIRSKYNNYATYYADSVKD (SEQ ID NO: 54); a VH CDR3 comprising the amino acid sequence HGNFGNSYVSWFAY (SEQ ID NO: 55), a VL CDR1 comprising the amino acid sequence RSSTGAVTTSNYAN (SEQ ID NO: 56); a VL CDR2 comprising the amino acid sequence GTNKRAP (SEQ ID NO: 57); and a VL CDR3 comprising the amino acid sequence ALWYSNLWV (SEQ ID NO: 58).

28. The activatable antibody as in any of claims 11 to 26, wherein the AB comprises the amino acid sequence of SEQ ID NO: 587.

29. The activatable antibody as in any of claims 11 to 26, wherein the AB comprises the amino acid sequence of SEQ ID NO: 588.

30. The activatable antibody as in any of claims 11 to 26, wherein the activatable antibody comprises a heavy chain sequence selected from the group consisting of SEQ ID NOs: 446, 452, 454, 456, 460, 462, 464, 466, 470, 472, 476, 478, 480, 486, 488, 490, 492, 494, 496, 498, 500, 502, 504, 510, 512, 514, 518, 524, 526, 530, 532, 534, 536, 538, 540, 542, 544, and 546.

31. The activatable antibody as in any of claims 11 to 26, wherein the activatable antibody comprises a light chain sequence selected from the group consisting of SEQ ID NOs: 448, 450, 458, 468, 474, 482, 484, 508, 516, and 520.

32. The activatable antibody as in any of claims 11 to 26, wherein the activatable antibody comprises a heavy chain sequence selected from the group consisting of SEQ ID NOs: 446, 452, 454, 456, 460, 462, 464, 466, 470, 472, 476, 478, 480, 486, 488, 490, 492, 494, 496, 498, 500, 502, 504, 510, 512, 514, 518, 524, 526, 530, 532, 534, 536, 538, 540, 542, 544, and 546; and a light chain sequence selected from the group consisting of SEQ ID NOs: 448, 450, 458, 468, 474, 482, 484, 508, 516, and 520.

33. The activatable antibody as in any of claims 11 to 26, wherein the activatable antibody comprises the amino acid sequence of SEQ ID NO: 506.

34. The activatable antibody as in any of claims 11 to 33 comprising an agent conjugated to the AB.

35. The activatable antibody of claim 34, wherein the agent is a therapeutic agent, an antineoplastic agent, a toxin or fragment thereof, a detectable moiety or a diagnostic agent.

36. The activatable antibody of claim 34, wherein the agent is conjugated to the AB via a linker.

37. The activatable antibody of claim 11, wherein the antibody or antigen-binding fragment thereof comprises a variable heavy chain (Hv) comprising the amino acid sequence of SEQ ID NO: 4 and a variable light chain (Lv) comprising the amino acid sequence of SEQ ID NO: 2.

38. The activatable antibody of claim 11, wherein the antibody or antigen-binding fragment thereof comprises a scFv fragment.

39. The activatable antibody of claim 38, wherein the scFv fragment comprises the amino acid sequence of SEQ ID NO: 6 or the amino acid sequence of SEQ ID NO: 30.

40. A pharmaceutical composition comprising an activatable antibody as in any of claim 11 to 33 or 37-39 and a carrier.

41. A pharmaceutical composition comprising an activatable antibody as in any of claims 11 to 39 and a carrier.

42. An isolated nucleic acid molecule encoding at least a portion of the isolated single chain variable antibody as in any of claims 1 to 5.

43. An isolated nucleic acid molecule encoding at least a portion of the activatable antibody as in any of claim 11-33 or 37-39.

44. A vector comprising the isolated nucleic acid molecule of claim 42 or claim 43.

45. A method of producing an isolated single chain variable antibody or an activatable antibody by culturing a cell under conditions that lead to expression of the antibody or the activatable antibody, wherein the cell comprises the nucleic acid molecule of claim 42 or claim 43.

46. A method of manufacturing an activatable antibody that binds the epsilon chain of CD3 (CD3ε) in an activated state, the method comprising:
(a) culturing a cell comprising a nucleic acid construct that encodes the activatable antibody under conditions that lead to expression of the activatable antibody, wherein the activatable antibody comprises a masking moiety (MM), a cleavable moiety (CM), and an antibody or an antigen binding fragment thereof (AB) that specifically binds the epsilon chain of CD3 (CD3ε),
and
(b) recovering the activatable antibody.

47. The method of claim 46, wherein the CM is a polypeptide that functions as a substrate for a protease.

48. The method of claim 46, wherein the CM is positioned in the activatable antibody such that, when the activatable antibody is in an uncleaved state, the MM interferes with specific binding of the AB to CD3ε and when the activatable antibody is in a cleaved state the MM does not interfere or compete with specific binding of the AB to CD3ε.

49. An isolated multispecific antibody that binds the epsilon chain of CD3 (CD3ε) and a second target, wherein the antibody comprises a first antibody or antigen-binding fragment thereof (AB1) that binds the epsilon chain of CD3 (CD3ε) and a second antibody or antigen-binding fragment thereof (AB2) that binds a second target, and wherein AB1 comprises a VH CDR1 comprising the amino acid sequence TYAMN (SEQ ID NO: 53); a VH CD2 comprising the amino acid sequence RIRSKYNNYATYYADSVKD (SEQ ID NO: 54); a VH CDR3 comprising the amino acid sequence HGNFGNSYVSWFAY (SEQ ID NO: 55), a VL CDR1 comprising the amino acid sequence RSSTGAVTTSNYAN (SEQ ID NO: 56); a VL CDR2 comprising the amino acid sequence GTNKRAP (SEQ ID NO: 57); and a VL CDR3 comprising the amino acid sequence ALWYSNLWV (SEQ ID NO: 58).

50. The multispecific antibody of claim 49, wherein AB1 comprises a variable heavy chain (Hv) comprising the amino acid sequence of SEQ ID NO: 4 and a variable light chain (Lv) comprising the amino acid sequence of SEQ ID NO: 2.

51. The multispecific antibody of claim 49, wherein the AB1 comprises a scFv fragment.

52. The multispecific antibody of claim 51, wherein the scFv fragment comprises the amino acid sequence of SEQ ID NO: 6 or the amino acid sequence of SEQ ID NO: 30.

53. The multispecific antibody of claim 49, wherein the AB comprises the amino acid sequence of SEQ ID NO: 587.

54. The multispecific antibody of claim 49, wherein the AB comprises the amino acid sequence of SEQ ID NO: 588.

55. The antibody of claim 49 comprising an agent conjugated to the antibody.

56. The multispecific antibody of claim 49, wherein the agent is a therapeutic agent, an antineoplastic agent, a toxin or fragment thereof, a detectable moiety or a diagnostic agent.

57. The multispecific antibody of claim 49, wherein the agent is conjugated to the antibody via a linker.

58. The multispecific antibody of claim 57, wherein the linker is a cleavable linker.

59. The multispecific antibody of claim 57, wherein the linker is a non-cleavable linker.

60. The multispecific antibody of claim 49, wherein the multispecific antibody is selected from:
a multispecific antibody comprising:
a cleavable moiety (CM) coupled to the AB2, wherein the CM is a polypeptide that functions as a substrate for a protease; and
a masking moiety (MM) that inhibits the binding of the AB2 to the second target when the CM is in an uncleaved state; and
a multispecific antibody comprising:
a cleavable moiety (CM) coupled to the AB1, wherein the CM is a polypeptide that functions as a substrate for a protease; and
a masking moiety (MM) that inhibits the binding of the AB1 to CD3ε when the CM is in an uncleaved state.

61. An isolated multispecific activatable antibody that binds the epsilon chain of CD3 (CD3ε) and a second target, the multispecific activatable antibody comprising
a first antibody or an antigen binding fragment thereof (AB1) that specifically binds to CD3ε and a second antibody or antigen-binding fragment thereof (AB2) that binds a second target, wherein AB1 comprises a VH CDR1 comprising the amino acid sequence TYAMN (SEQ ID NO: 53); a VH CD2 comprising the amino acid sequence RIRSKYNNYATYYADSVKD (SEQ ID NO: 54); a VH CDR3 comprising the amino acid sequence HGNFGNSYVSWFAY (SEQ ID NO: 55), a VL CDR1 comprising the amino acid sequence RSSTGAVTTSNYAN (SEQ ID NO: 56); a VL CDR2 comprising the amino acid sequence GTNKRAP (SEQ ID NO: 57); and a VL CDR3 comprising the amino acid sequence ALWYSNLWV (SEQ ID NO: 58);
a masking moiety (MM) that inhibits the binding of the AB2 to the second target when the multispecific activatable antibody is in an uncleaved state; and
a cleavable moiety (CM) coupled to the AB2, wherein the CM is a polypeptide that functions as a substrate for a protease.

62. The multispecific activatable antibody of claim 61, wherein the target of AB2 is selected from the group of targets listed in Table 1.

63. The multispecific activatable antibody of claim 61, wherein AB2 is or is derived from an antibody selected from the group of antibodies listed in Table 2.

64. The multispecific activatable antibody of claim 61, wherein the antigen binding fragment thereof is selected from the group consisting of a Fab fragment, a F(ab′)₂ fragment, a scFv, a scAb, a dAb, a single domain heavy chain antibody, and a single domain light chain antibody.

65. The multispecific activatable antibody of claim 61, wherein the MM has a dissociation constant for binding to the AB that is selected from the group consisting of: greater than the dissociation constant of the AB to the target; equivalent to the dissociation constant of the AB to CD3ε; and less than the dissociation constant of the AB to CD3ε.

66. The multispecific activatable antibody of claim 61, wherein the MM does not interfere or compete with the AB for binding to the target when the multispecific activatable antibody is in a cleaved state.

67. The multispecific activatable antibody of claim 61, wherein the MM is a polypeptide of no more than 40 amino acids in length.

68. The multispecific activatable antibody of claim 61, wherein the MM polypeptide sequence is different from that of the target of AB2, and wherein the MM polypeptide sequence is no more than 50% identical to any natural binding partner of AB2.

69. The multispecific activatable antibody of claim 61, wherein the CM is a polypeptide of up to 15 amino acids in length.

70. The multispecific activatable antibody of claim 61, wherein the protease is produced by a tumor that is in proximity to cells that express CD3ε in a tissue and/or produced by a tumor that is co-localized with the target of AB2 in a tissue, and wherein the protease cleaves the CM in the multispecific activatable antibody when the multispecific activatable antibody is exposed to the protease.

71. The multispecific activatable antibody of claim 61, wherein the multispecific activatable antibody comprises a linking peptide between the MM and the CM.

72. The multispecific activatable antibody of claim 61, wherein the multispecific activatable antibody comprises a linking peptide between the CM and the AB.

73. The multispecific activatable antibody as in any of claims 61 to 72, wherein the multispecific activatable antibody comprises a first linking peptide (LP1) and a second linking peptide (LP2), and wherein the multispecific activatable antibody in an uncleaved state has the structural arrangement from N-terminus to C-terminus as follows: MM-LP1-CM-LP2-AB or AB-LP2-CM-LP1-MM.

74. The multispecific activatable antibody of claim 73, wherein the two linking peptides are not identical to each other.

75. The multispecific activatable antibody of claim 73, wherein each of LP1 and LP2 is a peptide of about 1 to 20 amino acids in length.

76. The multispecific activatable antibody of claim 73, wherein at least one of LP1 or LP2 comprises an amino acid sequence selected from the group consisting of (GS)ₙ, (GGS)ₙ, (GSGGS)ₙ (SEQ ID NO: 59) and (GGGS)ₙ (SEQ ID NO: 60), GGSG (SEQ ID NO: 61), GGSGG (SEQ ID NO: 62), GSGSG (SEQ ID NO: 63), GSGGG (SEQ ID NO: 64), GGGSG (SEQ ID NO: 65), and GSSSG (SEQ ID NO: 66), where n is an integer of at least one.

77. The multispecific activatable antibody of claim 61, wherein the CM is a substrate for a protease selected from the group consisting of the proteases shown in Table 3 or wherein the CM comprises an amino acid sequence selected from the group consisting of SEQ ID NO: 67-86, 321-341, and 896-926.

78. A multispecific activatable antibody that in an activated state binds the epsilon chain of CD3 (CD3ε) and a second target, the multispecific activatable antibody comprising:
at least a first antibody or an antigen binding fragment thereof (AB1) that specifically binds CD3ε;
a second antibody or an antigen binding fragment thereof (AB2) that specifically binds a second target or epitope;
at least a first masking moiety (MM1) that inhibits the binding of the AB1 to CD3ε when the multispecific activatable antibody is in an uncleaved state; and
at least a first cleavable moiety (CM1) coupled to the AB1, wherein the CM1 is a polypeptide that functions as a substrate for a protease.

79. A multispecific activatable antibody that in an activated state binds the epsilon chain of CD3 (CD3ε) and a second target, the multispecific activatable antibody comprising:
at least a first antibody or an antigen binding fragment thereof (AB1) that specifically binds CD3ε;
at least a first masking moiety (MM1) that inhibits the binding of the AB1 to CD3ε when the multispecific activatable antibody is in an uncleaved state;
at least a first cleavable moiety (CM1) coupled to the AB1, wherein the CM1 is a polypeptide that functions as a substrate for a protease;
at least a second antibody or an antigen binding fragment thereof (AB2) that specifically binds a second target or epitope;
at least a second masking moiety (MM2) that inhibits the binding of the AB2 to the second target or epitope when the multispecific activatable antibody is in an uncleaved state; and
at least a second cleavable moiety (CM2) coupled to the AB2, wherein the CM2 is a polypeptide that functions as a substrate for a protease.

80. The multispecific activatable antibody of claim 61, claim 78 or claim 79, wherein the MM1 and/or the MM2 has a dissociation constant for binding to the AB1 and/or AB2 which is selected from the group consisting of: greater than the dissociation constant of the AB1 to CD3ε and/or than the dissociation constant of the AB2 to the second target or epitope; equivalent to the dissociation constant of the AB1 to CD3ε and/or than the dissociation constant of the AB2 to the second target or epitope; and less than the dissociation constant of the AB1 to CD3ε and/or than the dissociation constant of the AB2 to the second target or epitope.

81. The multispecific activatable antibody of claim 61, claim 78 or claim 79, wherein the MM1 polypeptide sequence is different from that of CD3ε, the MM2 polypeptide sequence is different from that of the second target or epitope, and wherein the MM1 polypeptide sequence and/or the MM2 polypeptide sequence is no more than 50% identical to any natural binding partner of AB1 and/or AB2.

82. The multispecific activatable antibody of claim 61, claim 78 or claim 79, wherein the MM1 and/or MM2 does not interfere or compete with the AB1 for binding to CD3ε and/or with the AB2 for binding to the second target or epitope when the multispecific activatable antibody is in a cleaved state.

83. The multispecific activatable antibody of claim 61, claim 78 or claim 79, wherein the MM1 comprises a sequence selected from the group consisting of the sequences shown in Table 7 or Table 8.

84. The multispecific activatable antibody of claim 61, claim 78 or claim 79, wherein the protease that cleaves CM1 and/or CM2 is produced by a tumor that is in proximity to cells that express CD3ε in a tissue and/or produced by a tumor that is co-localized with the CD3ε and/or the second target or epitope in a tissue, and wherein the protease cleaves CM1 and/or CM2 in the multispecific activatable antibody when the multispecific activatable antibody is exposed to the protease.

85. The multispecific activatable antibody of claim 61, claim 78 or claim 79, wherein at least a portion of the multispecific activatable antibody in the uncleaved state has the structural arrangement from N-terminus to C-terminus as follows: MM1-CM1-AB1, AB1-CM1-MM1, MM2-CM2-AB2, or AB2-CM2-MM2.

86. The multispecific activatable antibody of claim 61, claim 78 or claim 79, wherein the multispecific activatable antibody comprises a linking peptide between the MM1 and the CM1 and/or between the MM2 and the CM2.

87. The multispecific activatable antibody of claim 61, claim 78 or claim 79, wherein the multispecific activatable antibody comprises a linking peptide between the CM1 and the AB1 and/or between the CM2 and the AB2.

88. The multispecific activatable antibody of claim 61, claim 78 or claim 79, wherein the multispecific activatable antibody comprises a first linking peptide (LP1) and a second linking peptide (LP2), and wherein the multispecific activatable antibody in the uncleaved state has the structural arrangement from N-terminus to C-terminus as follows: MM1-LP1-CM1-LP2-AB1, AB1-LP2-CM1-LP1-MM1, MM2-LP1-CM2-LP2-AB2, or AB2-LP2-CM2-LP1-MM2.

89. The multispecific activatable antibody of claim 88, wherein the two linking peptides need not be identical to each other.

90. The multispecific activatable antibody of claim 88, wherein each of LP1 and LP2 is a peptide of about 1 to 20 amino acids in length.

91. The multispecific activatable antibody of claim 61, claim 78 or claim 79, wherein the MM1 and/or the MM2 is a polypeptide of no more than 40 amino acids in length.

92. The multispecific activatable antibody of claim 61, claim 78 or claim 79, wherein the CM1 and/or CM2 is a polypeptide of up to 15 amino acids in length.

93. The multispecific activatable antibody of claim 61, claim 78 or claim 79, wherein the CM1 and/or CM2 is a substrate for a protease selected from the group consisting of the proteases listed in Table 3 or wherein the CM1 and/or CM2 comprises an amino acid sequence selected from the group consisting of SEQ ID NO: 67-86, 321-341, and 896-926.

94. The multispecific activatable antibody of claim 61, claim 78 or claim 79, wherein the antigen binding fragment thereof of AB1 and/or AB2 is selected from the group consisting of a Fab fragment, a F(ab′)₂ fragment, a scFv, a scab, a dAb, a single domain heavy chain antibody, and a single domain light chain antibody.

95. The multispecific activatable antibody as in any of claims 78 to 94, wherein AB1 comprises a VH CDR1 comprising the amino acid sequence TYAMN (SEQ ID NO: 53); a VH CD2 comprising the amino acid sequence RIRSKYNNYATYYADSVKD (SEQ ID NO: 54); a VH CDR3 comprising the amino acid sequence HGNFGNSYVSWFAY (SEQ ID NO: 55), a VL CDR1 comprising the amino acid sequence RSSTGAVTTSNYAN (SEQ ID NO: 56); a VL CDR2 comprising the amino acid sequence GTNKRAP (SEQ ID NO: 57); and a VL CDR3 comprising the amino acid sequence ALWYSNLWV (SEQ ID NO: 58).

96. The multispecific activatable antibody as in any of claims 78 to 94, wherein AB1 comprises a variable heavy chain (Hv) comprising the amino acid sequence of SEQ ID NO: 4 and a variable light chain (Lv) comprising the amino acid sequence of SEQ ID NO: 2.

97. The multispecific activatable antibody as in any of claims 78 to 94, wherein the AB1 and/or AB2 comprises a scFv fragment.

98. The multispecific activatable antibody as in any of claims 78 to 94, wherein the AB1 comprises a scFv fragment, and wherein the scFv fragment comprises the amino acid sequence of SEQ ID NO: 6 or the amino acid sequence of SEQ ID NO: 30.

99. The multispecific activatable antibody as in any of claims 78 to 94, wherein the AB1 comprises the amino acid sequence of SEQ ID NO: 587.

100. The multispecific activatable antibody as in any of claims 78 to 94, wherein the AB1 comprises the amino acid sequence of SEQ ID NO: 588.

101. The multispecific activatable antibody as in any of claims 78 to 94, wherein the target of AB2 is selected from the group of targets listed in Table 1.

102. The multispecific activatable antibody as in any of claims 78 to 94, wherein AB2 is or is derived from an antibody selected from the group of antibodies listed in Table 2.

103. The multispecific activatable antibody of claim 78 or claim 79 comprising an agent conjugated to at least one of AB1 and AB2.

104. The multispecific activatable antibody of claim 103, wherein the agent is a therapeutic agent, an antineoplastic agent, a toxin or fragment thereof, a detectable moiety or a diagnostic agent.

105. The multispecific activatable antibody of claim 103, wherein the agent is conjugated to at least one of AB1 and AB2 via a linker.

106. A pharmaceutical composition comprising the multispecific antibody as in any of claim 49-55 or 60-77 or the multispecific activatable antibody as in any of claims 78-102 and a carrier.

107. A pharmaceutical composition comprising the multispecific antibody as in any of claims 49-77 or the multispecific activatable antibody as in any of claims 78-102 and a carrier.

108. An isolated nucleic acid molecule encoding at least a portion of the multispecific antibody as in any of claims 49-54.

109. An isolated nucleic acid molecule encoding at least a portion of the multispecific activatable antibody as in any of claims 95-100.

110. A vector comprising the isolated nucleic acid molecule of claim 108 or claim 109.

111. A method of producing a multispecific antibody or a multispecific activatable antibody that specifically binds at least the epsilon chain of CD3 (CD3ε), the method comprising culturing a cell under conditions that lead to expression of the multispecific antibody or multispecific activatable antibody, wherein the cell comprises the nucleic acid molecule of claim 108 or claim 109.

112. A method of manufacturing a multispecific activatable antibody that in an activated state binds the epsilon chain of CD3 (CD3ε) and a second target, the method comprising:
(a) culturing a cell comprising a nucleic acid construct that encodes the multispecific activatable antibody under conditions that lead to expression of the multispecific activatable antibody, wherein the activatable antibody is selected from the group consisting of:
(i) an activatable antibody comprising at least a first antibody or an antigen binding fragment thereof (AB1) that specifically binds CD3ε, a second antibody or an antigen binding fragment thereof (AB2) that specifically binds a second target or epitope, at least a first masking moiety (MM1) that inhibits the binding of the AB1 to CD3ε when the multispecific activatable antibody is in an uncleaved state, and at least a first cleavable moiety (CM1) coupled to the AB1, and
(ii) an activatable antibody comprising at least a first antibody or an antigen binding fragment thereof (AB1) that specifically binds CD3ε, a second antibody or an antigen binding fragment thereof (AB2) that specifically binds a second target or epitope, a first masking moiety (MM1) that inhibits the binding of the AB1 to CD3ε when the multispecific activatable antibody is in an uncleaved state, a second masking moiety (MM2) that inhibits the binding of the AB2 to its target when the multispecific activatable antibody is in an uncleaved state, a first cleavable moiety (CM1) coupled to the AB1, and a second cleavable moiety (CM2) coupled to the AB2;
and
(b) recovering the activatable antibody.

113. The method of claim 112, wherein the CM1, the CM2, or both CM1 and CM2 is a polypeptide that functions as a substrate for a protease.

114. The method of claim 112, wherein the CM1 is positioned in the activatable antibody such that, when the activatable antibody is in an uncleaved state, the MM1 interferes with specific binding of the AB1 to CD3ε and when the activatable antibody is in a cleaved state the MM1 does not interfere or compete with specific binding of the AB1 to CD3ε, and wherein the CM2 is positioned in the activatable antibody such that, when the activatable antibody is in an uncleaved state, the MM2 interferes with specific binding of the AB2 to its target and when the activatable antibody is in a cleaved state the MM2 does not interfere or compete with specific binding of the AB2 to its target.

115. A method of alleviating a symptom of a clinical indication associated with a disorder in a subject, the method comprising administering the isolated single chain variable antibody as in any of claims 1-5 or the activatable antibody as in any of claim 11-33 or 37-39, or the multispecific antibody as in any of claim 49-54 or 60, or the multispecific activatable antibody as in any of claims 61-102 to a subject in need thereof in an amount sufficient to alleviate the symptom of the clinical indication associated with the disorder.

116. A method of alleviating a symptom of a clinical indication associated with a disorder in a subject, the method comprising administering the isolated single chain variable antibody as in any of claims 1-8 or the activatable antibody as in any of claims 11-39, or the multispecific antibody as in any of claims 49-60, or the multispecific activatable antibody as in any of claims 61-105 to a subject in need thereof in an amount sufficient to alleviate the symptom of the clinical indication associated with the disorder.

117. The method of claim 115 or claim 116, wherein said subject is a human.

118. The method of claim 115 or claim 116, wherein the disorder is cancer.
